(19) United States
(12) Patent Application Publication
(10) Pub. No.: US 2015/0024956 A1
(43) Pub. Date: Jan. 22, 2015

(54) METHODS FOR DIAGNOSIS AND/OR PROGNOSIS OF GYNECOLOGICAL CANCER

(71) Applicant: AGENCY FOR SCIENCE, TECHNOLOGY AND RESEARCH, Singapore (SG)

(72) Inventors: Arsen Batagov, Singapore (SG); Anna Ivshina, Singapore (SG); Vladimir Kuznetsov, Singapore (SG)

(21) Appl. No.: 14/359,078

(22) PCT Filed: Nov. 19, 2012
(86) PCT No.: PCT/SG2012/000435

§ 371 Date: May 16, 2014

(30) Foreign Application Priority Data
Nov. 18, 2011 (SG) 201108632-9

(51) Int. Cl. C12Q 1/68

(52) U.S. Cl. CPC C12Q 1/6886; C12Q 2600/112
USPC 506/9; 536/24.31; 530/387.7

(57) ABSTRACT

Ovarian, cervical cancer, endometriosis, clear cell renal carcinoma cancers are very heterogeneous diseases which lack robust diagnostic, prognostic and predictive clinical biomarkers. Conventional clinical biomarkers (stages, grades, tumor mass etc) and molecular biomarkers (CA125, KRAS, p53 etc) are not appropriate for early diagnostics, differential diagnostics, prediction and prognosis of the disease outcome for individual patients. The most common type of the human ovarian cancers is human epithelial ovarian cancer (EOC). This cancer is characterized with one of the lowest survival rates compared to other cancers. The present invention relates to an in vitro method for diagnosing epithelial ovarian cancer, cervical cancer, endometriosis, dear cell renal carcinoma and/or predisposition to epithelial ovarian cancer in a subject, the method comprising determining in a sample of the subject gene expression level of at least one gene in the MDS1 and EVI1 complex (MECOM) locus; and/or copy number of at least one gene in the MECOM locus; wherein the level against at least one expression cutoff value and/or copy number against at least one copy number cutoff value are indicative of the subject having epithelial ovarian cancer, cervical cancer, endometriosis, clear cell renal carcinoma and/or a predisposition to epithelial ovarian cancer, cervical cancer, endometriosis, dear cell renal carcinoma and/or determining whether the ovarian cancer in the subject is primary or secondary ovarian cancer and/or a risk of the disease progression after surgery treatment, and/or an effectiveness of post-surgery chemotherapy.

### FIELD OF THE INVENTION

[0001] The present invention relates to method(s) for diagnosis and/or prognosis of cancer in a subject and in particular but not exclusively by analyzing MDS1 and EVI1 complex locus (also known as MECOM locus).

### BACKGROUND TO THE INVENTION

[0002] Cancers are one of the most leading causes of cancers in the world. Ovarian cancer and cervical cancer amongst others are very common cancers that affect women worldwide. Out of all the cancers that affect women, epithelial ovarian cancer (EOC) ranks fifth when considering woman cancer mortality in the world and fourth for the age group 40 to 59 years old, with overall a 5-year survival rate of women inflicted by EOC of only 46%. This is despite improvements in surgical techniques and the advent of more targeted therapeutics such as bevacizimab. The low survival rate is explained by the lack of diagnosis of EOC at an early stage, acquired resistance to chemotherapy in a significant number of patients over the years and the lack of effective therapies for advanced refractory disease. The 5-year survival rate is up to 95% if EOC diagnosis is made in the early stage of the disease.

[0003] EOC comprises three major histological subtypes; serous, mucinous and endometrioid. Serous EOC includes serous cystomas, serous benign cystadenomas, serous cystadenomas with proliferating activity of the epithelial cells and nuclear abnormalities but with no infiltrative destructive growth (low potential or borderline malignancy), and serous cystadenocarcinomas. Mucinous EOC includes mucinous cystomas, mucinous benign cystadenomas, mucinous cystadenomas with proliferating activity of the epithelial cells and nuclear abnormalities but with no infiltrative destructive growth (low potential or borderline malignancy), and mucinous cystadenocarcinomas. Endometrioid EOC includes endometrioid tumors (similar to adenocarcinomas in the endometrium), endometrioid benign cysts, endometrioid tumors with proliferating activity of the epithelial cells and nuclear abnormalities but with no infiltrative destructive growth (low malignant potential or borderline malignancy), and endometrioid adenocarcinomas. Two further, less-prevalent histological subtypes also exist, clear cell and undifferentiated.

[0004] EOC may also be categorized by “stages”, depending upon how far they have spread beyond the ovary. Thus, Stage I is defined as ovarian cancer that is confined to one or both ovaries. Stage II is defined as ovarian cancer that has spread to pelvic organs (e.g., uterus, fallopian tubes), but has not spread to abdominal organs. Stage III is defined as ovarian cancer that has spread to abdominal organs or the lymphatic system (e.g., pelvic or abdominal lymph nodes, on the liver, on the bowel). Finally, Stage IV is defined as ovarian cancer that has spread to distant sites (e.g., lung, inside the liver, brain, lymph nodes in the neck).

[0005] EOCs may be graded according to the appearance of the cancer cells. Low-grade (or Grade 1) means that the cancer cells look very like the normal cells of the ovary; they usually grow slowly and are less likely to spread. Moderate-grade (or Grade 2) means that the cells look more abnormal than low-grade cells. High-grade (or Grade 3) means that the cells look very abnormal. They are likely to grow more quickly and are more likely to spread.

[0006] EOC, like most other cancers, is thus a complex heterogeneous disease, influenced and controlled by multiple genetic and epigenetic alterations leading to an increasingly aggressive phenotype. It is now well recognised that the characteristics of an individual tumor and its life course results from multiple somatic mutations acquired over time (e.g. TP53, PTEN, RAS) and continual evolution of the host responses to environmental factors. From a therapeutic standpoint EOC is best considered a collection of complex inter-related diseases represented by an immense natural heterogeneity in tumor phenotypes, disease outcomes, and response to treatment.

[0007] A major challenge is thus to identify and thoroughly validate diagnostic and prognostic biomarkers that can accurately describe the heterogeneity ascribed to EOC. In addition, accurate predictive biomarkers are required to guide current treatment protocols, as well as to guide the development and application of new targeted therapies. CA-125 (MUC16, Cancer antigen 125) protein is currently considered the best diagnostic marker of EOC. However, the true positive rate of MUC16 test is only about 50% of stage I EOC patients, while it returns more than 80% of true positives for patients at stages I-IV. About 25% of EOCs especially at the early stages do not produce reliably-detectable CA-125 and therefore its application in clinical settings is limited. It has been reported that CA-125 in combination with human epididymis protein 4 (HE4) is elevated in greater than 90% of EOC. Such poor prognostic statistics indicate that there is an urgent need to improve understanding of the molecular mechanisms underlying EOC, so as to develop better prognostic and predictive assays and identify new therapeutic targets.

[0008] Currently there are about 15 oncogenes considered particularly important for ovarian cancers and 11 of them, including EVI1 have been shown to be amplified in the genome of cancer cells. Proto-oncogene EVI1 (ectopic viral integration site 1), encoded by the MECOM locus (Entrez GeneID: 2122) located at the 3q26 chromosome region, is amplified in many cancers. EVI1 protein was identified as an evolutionary conserved transcription factor sharing 94% amino acid sequence homology between human and mice. In the adult human tissues it is highly expressed in kidney, lung, pancreas, brain and ovaries. In mouse embryos it is highly expressed in the urinary system, lungs and heart and its activity is vital for the embryonic development. The majority of research of EVI1 describes its significance in pathology. If over-expressed in blood cells, EVI1 has been shown to produce a number of alternatively spliced transcripts and causes various hematopoietic disorders, including myeloid leukemias. EVI1 was found to be overexpressed in the blood of up to 21% patients with acute myeloid leukemia (AML). In 4% of AML cases chromosome region 3q is aberrated. High expression of EVI1, regardless the amplification of MECOM locus alone was recently found to be a significant survival factor for ovarian cancer patients. Chromosome region 3q25-27 is amplified in cancers in a various organs: ovary, cervix, lung, oesophagus, colon, head and neck and prostate. Amplification of MECOM is also associated with resistance to chemotherapy in EOC.

[0009] However, the information about the role of MECOM locus in ovarian cancer development has been contradictory. In a recent research, although remarkably high expression of EVI1 was detected in serous ovarian cancer tissues, fallopian tube fimbria and benign neoplasms, in comparison with normal tissues of different types, no influence of EVI1 transcript expression on cancer cell proliferation, induced apoptosis or double-strand DNA breaks was revealed in the tests of OVCAR8 cell culture (Jazaeri AA, 2010). In another research it was reported that amplification of MECOM locus can be associated with favorable patient prognosis in ovarian cancer (Nanjundan et al, 2007).

[0010] Accordingly, there is still a need in determining if EVI1 can be used as a biomarker in diagnosis of EOC and to find improved methods for the diagnosis and prognosis of EOC.

### SUMMARY OF THE INVENTION

[0011] The markers currently being used for detection of EOC lack adequate sensitivity and specificity to be applicable in large populations particularly during the early stages of ovarian cancer. The present invention attempts to fill this gap by proposing MECOM locus and its genes including non-limiting examples, EVI1 and/or MDS1 as more sensitive and specific diagnostic markers than MUC16, as well as other widely accepted biomarkers. In particular, the present invention relates to identification of clinically distinct sub-groups of EOC patients differentially characterized in one of the following aspects:
[0012] ovarian tumor primary origin (primary EOC versus secondary metastasis),
[0013] presence of ovarian cancer,
[0014] tumor malignancy potential,
[0015] patient's survival prognosis, and
[0016] effectiveness of treatment.

[0017] The identification of patient groups is achieved in the integrative analysis of DNA copy number variations and/or gene expression level of at least one gene from the MDS1 and/or EVI1 complex locus (also known as MECOM locus) in the tumor samples. Cutoff values for DNA copy number values of MECOM locus and expression levels of EVI1 and MDS1 genes belonging to this locus maximally separating the patient groups by the chosen criteria are obtained separately for MECOM locus genes: EVI1 and MDS1.

[0018] In particular, the diagnostic procedure for individual patients may comprise the steps of:
[0019] obtaining tumor sample material;
[0020] measurement of DNA copy number value of EVI1 and/or MDS1 gene;
[0021] measurement of gene expression level (using a non-limiting example of mRNA) of EVI1 and/or MDS1 genes;
[0022] comparison of the values obtained in the measurements of the above steps against the DNA copy number and/or expression cutoff values respectively.

[0023] According to one aspect, the present invention relates to an in vitro method for diagnosing EOC and/or predisposition to epithelial ovarian cancer in a subject and/or determining survival prognosis of a subject with epithelial ovarian cancer, and/or determining effectiveness of treatment of epithelial ovarian cancer, and/or determining if an epithelial ovarian cancer in a subject is of primary origin or secondary origin, the method comprising determining in a sample of the subject:
[0024] (i) gene expression level (using a non-limiting example of mRNA) of at least one gene in MECOM locus; and/or
[0025] (ii) DNA copy number value of at least one gene in MECOM locus;
   wherein the level against at least one expression cutoff value and/or DNA copy number against at least one DNA copy number cutoff value are indicative of the subject having EOC, or predisposition to EOC, or the survival prognosis of the subject or the effectiveness of the treatment on the subject.

[0026] According to a further aspect, there is provided a nucleotide sequence selected from the group consisting of SEQ ID NOs: 1-3, fragments, derivatives, variants and complementary sequences thereof

[0027] According to other aspects, the present invention provides kits, computer programs, and computer systems using the method according to any aspect of the present invention.

### BRIEF DESCRIPTION OF DRAWINGS

[0028] FIG. 1 is a graph showing that the expression of EVI1 gene of MECOM locus gene was strongly increased in ovarian cancer cells, in comparison with normal epithelium. Absciss axis—EOC tissue samples of individual patients at EOC stages I-IV and normal ovarian tissue from patients with non-cancerous gynecological diseases. Ordinate axis—MDS1 and EVI1 expression microarray signal.

[0029] FIG. 2 are four graphs (A-D) with A and B showing that MECOM locus genes expression microarray signals in combination with each other and with MUC16 discriminates between normal and cancerous ovarian epithelia better than the current best clinically used biomarker combination MUC16-WFDC2 (C). D is a comparison of ROC curves of MECOM locus gene EVI1 with the current best clinical diagnostic markers WFDC2 and MUC16.

[0030] FIG. 3 are graphs (A-B) showing that EVI1 and MDS1 genes of MECOM locus are more sensitive and specific than many conventional biomarkers in discriminating diagnosis of primary EOC tumors vs. breast cancer metastases in the ovaries (A) and LMP vs. malignant tumors (B). Cumulative distribution curves of microarray expression values are given.

[0031] FIG. 4 are two graphs showing that a combination of expression levels of MECOM locus genes EVI1 and MDS1 is important for diagnostics of primary EOC tumors vs. breast cancer metastases in the ovaries (A) and LMP vs. malignant tumors (B). Microarray expression values are given.

[0032] FIG. 5 are graphs showing that MECOM locus gene EVI1 is a more sensitive and specific biomarker in of primary EOC tumors vs. breast cancer metastases in the ovaries (A) and LMP vs. malignant tumors (B) than the most sensitive and specific clinically used biomarkers WFDC2 and MUC16 which are amongst the many conventional biomarkers. ROC curves of microarray expression values are given.

[0033] FIG. 6 are graphs showing that a combination of EVI1 and ERBB family genes expression are one of the most sensitive biomarkers of primary EOC. Microarray expression values are given.

[0034] FIG. 7 is an illustration of DNA copy number variations on chromosome 3 that shows that the 3′ end of MECOM locus is the strongest gene amplification hot spot in the genomes of EOC tumor cells.

[0035] FIG. 8 are graphs (A-D) showing A) that the amplification of MECOM locus together with the expression of its genes EVI1 and MDS1 are stronger indicators of EOC patients survival prognosis than many conventional biomarkers, B) the distribution of EVI1 and MDS1 genes copy number values, C) the optimal values Pₘᵢₙ of survival prognosis predicted by the combination of DNA copy number and expression values of EVI1 and MDS1, D) the optimal values giving the strongest survival prognosis are different for subgroups of patients with EVI1 and MDS1 gene amplification, the prognostic value of both genes being stronger within these patient subgroups.

[0036] FIG. 9 is a graph showing that EVI1 is a powerful marker for discriminating between poor and good prognosis patients at a short prognostic time period (up to 300 days after surgery treatment). Left to right: DNA copy number, microarray expression and survival curves of patients separated by the expression of EVI1 and MDS1 genes are presented.

[0037] FIG. 10 are graphs that show that EVI1 is a marginally significant marker for discriminating between poor and good prognosis patients at medium prognostic time period (up to 1500 days after surgery treatment). Left to right: DNA copy number, microarray expression and survival curves of patients separated by the expression of EVI1 and MDS1 genes are presented.

[0038] FIG. 11 are nomograms showing the dependency of the primary therapy response outcome patient group composition by response cohort (patient cohort fraction) on EVI1 and MDS1 copy number quantile values Q. The nomograms are used for therapy outcome prediction. Linear equations are chosen to approximate the dependency, but other types of equation are also possible.

[0039] FIG. 12 are graphs (A-B) showing a possibility of the secondary therapy outcome prediction based on EVI1 and MDS1 genes expression for A) patients without secondary chemotherapy B) with secondary chemotherapy. Copy number and microarray expression values are given.

[0040] FIG. 13 is an illustration of a method for robust survival prognosis using a combination of MECOM locus copy number and EVI1 and MDS1 expression values with primary therapy response outcome.

[0041] FIG. 14 is a graph showing the dependence of P-value of the difference between MECOM copy number distributions for patients with good and poor prognoses for a given limited time period on the time limit with a strong positive correlation.

[0042] FIG. 15 are graphs (A-C) showing that primary therapy response strongly correlates with patient last follow up time (A), which, in its turn, correlates with the P-values of EVI1 (B) and MDS1 (C) genes expression differentiating between patients with good and poor prognosis.

[0043] FIG. 16 are graphs (A-C) showing that the EVI1 and MDS1 transcription is a significant prognostic factor when used with patients with complete response to the primary therapy (“Complete response” group) and compared with a combined group containing patients demonstrating partial response, stable or progressive disease (“Incomplete response”). A) The cumulative distribution functions of EVI1 and MDS1 gene expression values for “Complete response” (black dots) and “Incomplete response” (grey dots). B) That EVI1 and MDS1 copy number and expression values as survival prognostic markers for patients with complete response to primary therapy. C) EVI1 and MDS1 copy number (MECOM locus) and expression values as survival prognostic markers for patients with partial response to primary therapy, stable or progressive disease.

[0044] FIG. 17 are graphs showing the algorithm for primary therapy outcome prediction and associated patient survival prognosis based on MECOM locus copy number data. 1) Identify the quantile (Q) of EVI1 gene copy number value, 2,3) determine the expected patient cohort composition based on Q, 4,5,6) determine the expected follow-up time for each patient cohort, 7) estimate the most probable survival time and the responses for each therapy outcome scenario (complete, partial or no response to the therapy).

[0045] FIG. 18 are graphs (A-C) showing that EVI1 expression is significantly different in tumors of the patients pre-treated with neo-adjuval chemotherapy, in comparison with tumors of patients untreated prior to surgery. Expression of EVI1 is measured by probesets 1881_g_at (A and C) and 1882_g_at (B). [HG_U95Av2 Alignments to Genome, PSL (2.3 MB, 9/28/06)]. As can be seen these results are significantly different in the tumors of the patients after neo-adjuval chemotherapy.

[0046] FIG. 19 are graphs (A and B) showing that EVI1 expression is significantly different in benign (adenoma) and malignant (ovarian carcinoma) ovarian tumors. Expression of EVI1 is measured by probesets 1881_g_at (A) and 1882..g_at (B).

[0047] FIG. 20 are graphs (A and B) showing that EVI1 expression is significantly different in cervical cancer tumors compared to normal cervical epithelium. For EVI1 (probeset 221884_at) expression values (A) and their cumulative distribution (B) are presented.

[0048] FIG. 21 are graphs (A, B, C and D) showing that EVI1 and MDS1 expression is significantly different in endometriosis tumors compared to normal endometrium. A, B—EVI1 (probeset 221884_at) expression. C, D—MDS1 (probeset 208434_at) expression. The expression values (A, C) and EV71 and MDS1 cumulative distribution are presented as graphs B and D respectively.

[0049] FIG. 22 are graphs (A and B) showing that EVI1 expression is significantly different in clear cell renal cell carcinoma tumor, in comparison with normal kidney epithelium. For EVI1 (probeset 221884_at) expression values (A) and their cumulative distribution (B) are presented.

[0050] FIG. 23 are graphs (A,B and C) showing that the primers (EVI1-For and EVI1-rev), by measuring EVI1 expression, can discriminate ovarian cancer tumor from ovarian surface epithelium with 100% specificity and sensitivity and can be used for patient survival prognosis. A) Distribution of EVI1 expression qPCR fold change (relative to normal ovarian surface epithelium, “N”) measurements by ovarian cancer stage; B) Fold change distribution and the P-values comparing ovarian cancer tumors at each stage (I to IV) with ovarian surface epithelium (N); C) Cumulative fraction of surviving patients significantly discriminated by the EVI1 expression measurement with fold change cutoff 16.76; P-value for the Cox-proportional survival model is given; Thick grey line marks the survival of the unfavourable prognosis group with EVI1 expression higher than the cutoff value.

### DETAILED DESCRIPTION OF THE PREFERRED EMBODIMENTS

[0051] Bibliographic references mentioned in the present specification are for convenience listed in the form of a list of references and added at the end of the examples. The whole content of such bibliographic references is herein incorporated by reference.

### DEFINITIONS

[0052] For convenience, certain terms employed in the specification, examples and appended claims are collected here.

[0053] The term “aptamer” is herein defined to be oligonucleic acid or peptide molecule that binds to a specific target molecule. In particular, an aptamer used in the present invention may be generated using different technologies known in the art which include but is not limited to systematic evolution of ligands by exponential enrichment (SELEX) and the like.

[0054] The term “comprising” is herein defined to be that where the various components, ingredients, or steps, can be conjointly employed in practicing the present invention.

[0055] Accordingly, the term “comprising” encompasses the more restrictive terms “consisting essentially of” and “consisting of.” With the term “consisting essentially of” it is understood that the method according to any aspect of the present invention “substantially” comprises the indicated step as “essential” element. Additional steps may be included.

[0056] The term “difference” between two groups of patients is herein defined to be the statistical significance (p-value) of a partitioning of the patients within the two groups. Thus; achieving a “maximum difference” means finding a partition of maximal statistical significance (i.e. minimal p-value).

[0057] The term “label” or “label containing moiety” refers in a moiety capable of detection, such as a radioactive isotope or group containing same and nonisotopic labels, such as enzymes, biotin, avidin, streptavidin, digoxygenin, luminescent agents, dyes, haptens, and the like. Luminescent agents, depending upon the source of exciting energy, can be classified as radio luminescent, chemiluminescent, bio luminescent, and photo luminescent (including fluorescent and phosphorescent). A probe described herein can be bound, for example, chemically bound to label-containing moieties or can be suitable to be so bound. The probe can be directly or indirectly labelled.

[0058] The term “locus” is herein defined to be a specific location of a gene or DNA sequence on a chromosome. A variant of the DNA sequence at a given locus is called an allele. The ordered list of loci known for a particular genome is called a genetic map. Gene mapping is the process of determining the locus for a particular biological trait. For example, the MECOM locus comprises at least two genes MDS1 and EVI1, which expression results in transcription of, at least two corresponding transcripts, i.e. mRNA variants. The two transcripts may be the longer transcript of MDS1 and the shorter transcript of EVI1. In particular, the sequence of the MECOM locus may comprise SEQ ID NO: 10.

[0059] The term “MECOM locus” is herein defined according to the definition provided in the RefSeq NCBI database as “MDS1 and EVI1 complex locus (MECOM)” or “MDS1 and EVI1 complex locus” (Unigene Hs.659873) and may be essentially characterized by its genomic coordinates hg18.chr3:170,283,981-170,864,257 (SEQ ID NO: 10) and by its non-limiting longest transcripts NM_{—}004991.3) SEQ ID NO:4, NM_{—}001205194.1 (SEQ ID NO:5), NM_{—}001105078.3 (SEQ ID NO:11), NM_{—}001105077.3 (SEQ ID NO:12), NM_{—}005241.3 (SEQ ID NO:13), NM_{—}001164000.1 (SEQ ID NO:14), NM_{—}001163999.1 (SEQ ID NO:15) and the like. The sequences of these seven isoforms may be targeted by the probes according to any aspect of the present invention. The probes of the present invention may be capable of detecting these isoforms and other isoforms found in other cells.

[0060] The term “copy number (CN) value” or “DNA copy number value” is herein defined to refer to the number of copies of at least one DNA segment (locus) in the genome. The genome comprises DNA segments that may range from a small segment, the size of a single base pair to a large chromosome segment covering more than one gene. This number may be used to measure DNA structural variations, such as insertions, deletions and inversions occurring in a given genomic segment in a cell or a group of cells. In particular, the CN value may be determined in a cell or a group of cells by several methods known in the art including but not limited to comparative genomic hybridisation (CGH) microarray, qPCR, electrophoretic separation and the like. CN value may be used as a measure of the copy number of a given DNA segment in a genome. In a single cell, the CN value may be defined by discrete values (0, 1, 2, 3 etc.). In a group of cells it may be a continuous variable, for example, a measure of DNA fragment CN ranging around 2 plus/minus increment d (theoretically or empirically defined variations). This number may be larger than 2+d or smaller than 2-d in the cells with a gain or loss of the nucleotides in a given locus, respectively.

[0061] The term “complementary” is used herein in reference to polynucleotides (i.e., a sequence of nucleotides such as an oligonucleotide or a target nucleic acid) related by the base-pairing rules. For example, for the sequence “5′-A-G-T-3′,” is complementary to the sequence “3′-T-C-A-5′.” The degree of complementarity between nucleic acid strands has significant effects on the efficiency and strength of hybridization between nucleic acid strands. This is of particular importance in amplification reactions, as well as detection methods that depend upon binding between nucleic acids. In particular, the “complementary sequence” refers to an oligonucleotide which, when aligned with the nucleic acid sequence such that the 5′ end of one sequence is paired with the 3′ end of the other, is in “anti-parallel association.” Certain bases not commonly found in natural nucleic acids may be included in the nucleic acids disclosed herein and include, for example, inosine and 7-deazaguanine. Complementarity need not be perfect; stable duplexes may contain mismatched base pairs or unmatched bases. Those skilled in the art of nucleic acid technology can determine duplex stability empirically considering a number of variables including, for example, the length of the oligonucleotide, base composition and sequence of the oligonucleotide, ionic strength and incidence of mismatched base pairs. Where a first oligonucleotide is complementary to a region of a target nucleic acid and a second oligonucleotide has complementary to the same region (or a portion of this region) a “region of overlap” exists along the target nucleic acid. The degree of overlap may vary depending upon the extent of the complementarity.

[0062] The term “comprising” is herein defined as “including principally, but not necessarily solely”. Furthermore, the term “comprising” will be automatically read by the person skilled in the art as including “consisting of”. The variations of the word “comprising”, such as “comprise” and “comprises”, have correspondingly varied meanings.

[0063] The term “derivative,” is herein defined as the chemical modification of the oligonucleotides of the present invention, or of a polynucleotide sequence complementary to the oligonucleotides. Chemical modifications of a polynucleotide sequence can include, for example, replacement of hydrogen by an alkyl, acyl, or amino group.

[0064] The term “fragment” is herein defined as an incomplete or isolated portion of the full sequence of an oligonucleotide which comprises the active/binding site(s) that confers the sequence with the characteristics and function of the oligonucleotide. In particular, it may be shorter by at least one nucleotide or amino acid. More in particular, the fragment comprises the binding site(s) that enable the oligonucleotide to bind to influenza virus. A fragment of the oligonucleotides of the present invention may be about 20 nucleotides in length. In particular, the length of the fragment may be at least about 10 nucleotides in length. For example, the fragment of the forward primer may comprise at least 10, 12, 15, 18 or 19 consecutive nucleotides of SEQ ID NO:1, and/or the reverse primer may comprise at least 10, 12, 15, 18, 19, 20, 22, or 24 consecutive nucleotides of SEQ ID NO:2. More in particular, the fragment of the primer may be at least 15 nucleotides in length.

[0065] The term “mutation” is herein defined as a change in the nucleic acid sequence of a length of nucleotides. A person skilled in the art will appreciate that small mutations, particularly point mutations of substitution, deletion and/or insertion has little impact on the stretch of nucleotides, particularly when the nucleic acids are used as probes. Accordingly, the oligonucleotide(s) according to the present invention encompasses mutation(s) of substitution(s), deletion(s) and/or insertion(s) of at least one nucleotide. Further, the oligonucleotide(s) and derivative(s) thereof according to the present invention may also function as probe(s) and hence, any oligonucleotide(s) referred to herein also encompasses their mutations and derivatives. For example, if mutations occur at a few base positions at any primer hybridization site of the target gene, particularly to the 5′-terminal, the sequence of primers may not affect the sensitivity and the specificity of the primers.

[0066] With respect to associations between disease and CN value, a level of variation (deviation) in a DNA segment CN might be important. A level of positive or negative increment of the CN from normal dynamical range in a DNA sample of a given cell group or a single cell may be called CN variation.

[0067] The term “diagnosing” and “diagnosis” is herein defined to include the act or process of identifying the existence and/or type of cancer from which an individual may be suffering. Thus, in one embodiment, diagnosis includes the differentiation of a particular cancer type, namely EOC, from one or more other cancers. In an alliterative embodiment, binding moieties of the invention are for use in classifying EOC patients into clinically relevant groups based on overall survival and/or cancer-specific survival.

[0068] The term “prognosis” is herein defined to include the act or process of predicting the probable course and outcome of a cancer, e.g. determining survival probability and/or recurrence-free survival (RFS) probability.

[0069] The term “binding moiety” is herein defined to be a molecule or entity that is capable of binding to target genomic DNA, a target protein or mRNA encoding the same. For example, a binding moiety can be a probe such as a single stranded oligonucleotide at the time of hybridization to a target protein. Probes include but are not limited to primers, i.e., oligonucleotides that can be used to prime a reaction, for example at least in a PCR reaction. In particular, the probe may be capable of binding to ENV1 or MDS1 protein or mRNA encoding the same and be used to quantify the gene expression level of ENV1 or MDS1. In another embodiment, the probe may capable of binding to the genomic DNA of MECOM locus (i.e. ENV1 or MDS1 genomic DNA) and may be capable of determining the copy number of ENV1 or MDS1.

[0070] It will be appreciated by persons skilled in the art that the binding moieties of the invention may be used for the diagnosis or prognosis of EOC of any histological subtype (for example, serous, mucinous, endometrioid, clear cell, undifferentiated or unclassifiable).

[0071] The term “sample” is herein defined to include but is not limited to be blood, sputum, saliva, mucosal scraping, tissue biopsy and the like. The sample may be an isolated cell sample which may refer to a single cell, multiple cells, more than one type of cell, cells from tissues, cells from organs and/or cells from tumors.

[0072] A person skilled in the art will appreciate that the present invention may be practiced without undue experimentation according to the method given herein. The methods, techniques and chemicals are as described in the references given or from protocols in standard biotechnology and molecular biology text books.

[0073] According to one aspect, there is provided at least one method for diagnosing n cancer, and/or predisposition to cancer in a subject, determining survival prognosis of a subject with cancer, and/or determining the effectiveness of treatment of cancer, and/or determining if the cancer is in a subject is of primary origin or secondary origin, the method comprising determining in a sample of the subject:

(i) gene expression level of at least one gene in the MECOM locus; and/or
(ii) copy number of at least one gene in the MECOM locus
wherein the gene expression level and/or copy number against at least one expression and copy number cutoff value respectively is indicative of the subject having cancer or predisposition to cancer and/or survival prognosis of a subject with cancer, and/or determining the effectiveness of treatment of cancer.

[0074] The gynecological cancer may be selected from the group consisting of epithelial ovarian cancer, cervical cancer, endometriosis, clear cell renal carcinoma and the like. In particular, the EOC may be adenocarcinoma or malignant ovarian cancer. In particular, the MECOM locus expression and/or copy number may be used for differential diagnostics of ovarian cancer compared to other types of cancers and/or normal tissues.

[0075] According to one aspect, there is provided at least one method for diagnosing epithelial ovarian cancer (EOC), predisposition to EOC in a subject, determining survival prognosis of a subject with EOC, and/or determining the effectiveness of treatment of EOC, and/or determining if an epithelial ovarian cancer in a subject is of primary origin or secondary origin, the method comprising determining in a sample of the subject:

(i) gene expression level of at least one gene in the MECOM locus; and/or
(ii) copy number of at least one gene in the MECOM locus
wherein the gene expression level and/or copy number against at least one expression and copy number cutoff value respectively is indicative of the subject having EOC or predisposition to EOC and/or survival prognosis of a subject with EOC, and/or determining the effectiveness of treatment of EOC.

[0076] EVI1 expression as a clinical biomarker may have the largest sensitivity and specificity among conventional biomarkers in the diagnostics of ovarian tumor metastasis. The EVI1 gene expression level is a good indicator of whether the tumors are primary or secondary. EVI1 gene expression may also be useful as a clinical biomarker with high specificity but lower sensitivity in the diagnostics of ovarian tumor malignancy potential.

[0077] In particular, EVI1 expression may be a clinical biomarker with large sensitivity and specificity among conventional biomarkers in the diagnostics of ovarian tumor primary origin and as a clinical biomarker with high specificity but lower sensitivity in the diagnostics of ovarian tumor malignancy potential.

[0078] The method according to any aspect of the present invention may be in vitro, or in vivo. In particular, the method may be in vitro, where the steps are carried out on a sample isolated from the subject. The sample may be taken from a subject by any method known in the art. For example but not limiting, ovarian tumor material may be extracted from ovaries, fallopian tubes, uterus, vagina and the like. Metastatic tumor may be extracted from peritoneal cavity, other body organs, tissues and the like. Cancer cells may be extracted from non limiting examples such as biological fluids, which include but are not limited to peritoneal liquid, blood, lymph, urine, products of body secretion and the like.

[0079] Quantifying of expression ecotropic virus integration site 1 protein homolog (EVI1), Myelodysplasia syndrome-1 (MDS1) and other gene transcripts used according to any aspect of the present invention may be done using any technique of gene expression quantification. Such techniques include, but are not limited to quantitative PCR, semi-quantitative PCR, gene expression microarray, next generation RNA sequencing and the like.

[0080] The copy number of MECOM, EVI1, MDS1 and/or other genes used according to any aspect of the present invention may be determined using any technique of gene copy number quantification. Such techniques include, but are not limited to quantitative PCR, semi-quantitative PCR, SNP microarrays, next-generation sequencing, cytogenetic techniques (such as in-situ hybridization, comparative genomic hybridization, comparative genomic hybridization), Southern blotting, multiplex ligation-dependent probe amplification (MLPA) and Quantitative Multiplex PCR of Short Fluorescent Fragments (QMPSF) and the like.

[0081] In particular, the method according to any aspect of the present invention comprises, consists of or consists essentially of determining the level of gene expression and/or copy number of the MECOM locus.

[0082] In particular, the method according to any aspect of the present invention comprises, consists of or consists essentially of determining the level of gene expression of EV1 and/or MDS1 of the MECOM locus. More in particular, the method further comprises, consists of or consists essentially of the step of determining the copy number of EV1 and/or MDS1 of the MECOM locus.

[0083] According to one embodiment, the method comprises, consists of or consists essentially of determining the level of gene expression and copy number of EV1 or MDS1. According to another embodiment, the method comprises, consists of or consists essentially of determining the level of gene expression of EV1 and copy number of MDS1. According to a further embodiment, the method comprises, consists of or consists essentially of determining the level of gene expression of MDS1 and the copy number of EV1. According to one embodiment, the method comprises, consists of or consists essentially of determining the level of gene expression of EV1 and MDS1 and the copy number of EV1. According to a further embodiment, the method comprises, consists of or consists essentially of determining the level of gene expression of MDS1 and the copy number of EV1 and MDS1. According to an even further embodiment, the method comprises, consists of or consists essentially of determining the level of gene expression and copy number of both EV1 and MDS1.

[0084] The method according to any aspect of the present invention may include a further step of determining the gene expression level of at least one further gene selected from the group consisting of MUC16, WFDC2, P53, KRAS, ERBB1, ERBB2, ERBB3, EGF, NGR1, TGFA, and MYC in the sample.

[0085] MUC16 and WFDC2 are existing clinically-approved markers for ovarian cancer. The use of these genes with EVI1 gene and/or the MDS1 may result in more sensitive and specific diagnosis and/or prognosis. In particular, better results may be obtained with a combination of the EVI1 gene expression level and the WFDC2 gene expression level (i.e. double combination). This combination can be used to obtain more accurate information about a subject relating to ovarian cancer (for example, whether the ovarian epithelia of the subject is normal or cancerous). Alternatively, the EVI1 gene expression level may also be combined with both the WFDC2 gene expression level and the MUC16 gene expression level to achieve even more accurate results. This triple combination achieves a more specific gene signature (i.e. a more specific marker) for ovarian cancer as compared to the double combination or to using the EVI1 gene expression level alone.

[0086] The treatment may be selected from the group consisting of chemotherapy, surgery and post-surgery chemotherapy.

[0087] The combination of expression data of MDS1 with EVI1 could be used also in pair for increasing the discrimination ability of tumor subtypes in ovarian cancer for example but not limited to low malignancy potential tumors, breast cancer metastases in the ovary, EOC and the like.

[0088] The expression cutoff values and copy number cutoff values may be obtained during a training stage using a plurality of training subjects with known diagnosis relating EOC whereby the training subjects comprise two sets of training subjects, each set associated with a different diagnosis. This may be done using a variety of ways.

[0089] In one example, the expression cutoff value is obtained for each gene with the following steps:

(1) extract the expression level of the gene for each training subject;
(2) obtain the cumulative distribution function of the gene expression levels of each set of training subjects (each set being associated with a different diagnosis as mentioned above); and
(3) select an expression cutoff value which divides the training subjects into two groups based on whether the gene expression level of each training subject is higher or lower than the expression cutoff value.

[0090] Any method known in the art for obtaining the cumulative distribution factor in step (2) may be used. In particular, the method may assume that there are two training sets: one with negative diagnosis/prognosis/prediction of size N₁, and the other with positive diagnosis/prognosis/prediction of size N₂, X₁—the value of parameter X for the negatively diagnosed patients, X₂—the value of parameter Y for the positively diagnosed patients, C—the chosen cutoff level for parameter X.

### Definitions:

[0091]

$${CDF}_{X} ( x ) = count ( X \leq x ) / N$$

$$Observed negatives = count ( X \leq C )$$

$$Observed positives = count ( X > C )$$

$$Then , \\ \{ \begin{matrix}TN = True negatives = count ( {X}_{1} \leq C ) = {N}_{1} {CDF}_{{X}_{1}} ( C ) \\ TP = True positives = count ( {X}_{2} \geq C ) = {N}_{2} {CDF}_{{X}_{2}} ( C ) \\ FN = False negatives = count ( {X}_{1} > C ) = {N}_{1} ( 1 - {CDF}_{{X}_{1}} ( C ) ) \\ FN = False positives = count ( {X}_{2} < C ) = {N}_{2} ( 1 - {CDF}_{{X}_{2}} ( C ) )\end{matrix}$$

[0092] In the simplest 1-dimensional case, the maximal difference is obtained with

$${C}_{opt} = {arg min}_{C} ( FP + FN ) = {arg min}_{C} ( {N}_{1} ( 1 - {CDF}_{{X}_{1}} ( C ) ) + {N}_{2} ( 1 - {CDF}_{{X}_{2}} ( C ) ) )$$

[0093] In a more complex, 2-dimensional case (e.g. 2 genes A and B), the CDF becomes a 2-D function CDF_{X} (X_{A}, X_{B}) and the maximal difference is obtained with a 2-D minimization.

[0094] In particular, the division of the training subjects into the two groups based on whether the gene expression level of each training subject is higher or lower than the expression cutoff value may be identical to a division of the training subjects into the two sets with different diagnoses. However, it may be difficult to achieve this ideal situation.

[0095] Therefore, in one example, the expression cutoff value may be chosen such that it achieves a maximum difference between the two divisions. In this example, the expression cutoff value may be chosen to minimize the number of false negatives. Depending on the diagnosis to be determined using the expression cutoff value, the false negatives can refer to the training subjects wrongly classified by the expression cutoff value into the group corresponding to the set of training subjects not having cancer, having secondary tumors, having low malignancy potential tumors and having a survival time beyond a certain value.

[0096] In another example, the diagnosis relates to the survival time of the subject and the cutoff expression value is chosen in step (3) to separate the training subjects into the two groups such that the two groups have maximally different (Wald statistics) survival curves (Cox-proportional model). This single 1-D optimization to achieve maximally different survival curves was used to obtain the expression cutoff values for the curves in FIG. 8A and the curves for the “Combined” cohort in FIG. 8D. The expression cutoff values for these figures are in log 2 scale and are denoted by the letter “C” above the graphs.

[0097] In this study, data regarding the test subjects and training subjects are obtained from the same database with the test subjects having known diagnosis as well (though, this known diagnosis is not required for obtaining information about the test subject). Note that it cannot be guaranteed that an expression cutoff value obtained using a group of subjects (training subjects) can definitely be used for evaluating another group of subjects (test subjects). Neither can it be guaranteed that the expression cutoff value can be used in a general diagnostic kit for all test subjects. It has been demonstrated through years of clinical practice that there is almost always a specific cohort having clinical values (obtained for a specific drug or marker) significantly different from the clinical values obtained during clinical trials. Many existing and certified diagnostic/prognostic kits (e.g. MammaPrint, OncoMine) face the same problem. To determine a more optimal cutoff expression value, either more specific to a given cohort, or more powerful across several cohorts, specialized clinical studies may be required.

[0098] In one example, a copy number cutoff value (for primary patient stratification) and two expression cutoff values are obtained for each gene using a two-step optimization algorithm as follows:

(1) extract the expression level and copy number of the gene for each training subject;
(2) estimate a copy number value and divide the training subjects into two cohorts according to whether their copy numbers of the gene is above or below the copy number;
(3) for each cohort obtained in step (2), select an expression value that divides the training subjects into two groups based on whether the gene expression level of each training subject is higher or lower than the expression value.

[0099] In another example, the diagnosis relates to the survival time of the subject and the expression value is chosen to separate the training subjects in the cohort into two groups such that the two groups have maximally different (Wald statistics) survival curves (Cox-proportional model). The training subjects in each cohort also comprise two sets of training subjects, each set associated with a different diagnosis. In a second example, the expression value is selected such that it achieves a maximum difference between the division of the training subjects in the cohort into the two groups based on the expression value and a division of the training subjects in the cohort into the two sets with different diagnoses. For example, the expression value may be chosen to minimize the number of false negatives. This way of selecting the expression value can be used for any type of diagnosis, include a diagnosis relating to the survival time of the subject.

(4) repeat steps (2)-(3) for a range of copy numbers;
(5) select the copy number cutoff value that achieves the maximum difference between the survival curves in a cohort (as in the first example) or the maximum difference between the divisions in a cohort (as in the second example). In one example, only the cohorts with the copy number of the gene above the respective estimated copy numbers are considered for selecting the copy number cutoff value. The expression cutoff values are then obtained as the expression values associated with the copy number cutoff value.

[0100] The cutoff values for obtaining the graphs (corresponding to both the “Amplified” and “Not amplified” cohorts) in FIG. 8D are obtained using the two-step optimization algorithm above.

[0101] The copy number of the gene of the subject may be determined from a tumor of the subject. The method may be for determining survival prognosis of the subject, wherein the method further comprises the steps of:
[0102] (i) parametrizing a dependence between a patient cohort fraction and the copy number of the gene of the set training subjects;
[0103] (ii) parametrizing a dependence between the patient cohort fraction and the survival time of the set of training subjects; and
[0104] (iii) using the copy number of the subject to determine the patient cohort fraction from the dependence of (i) and using the patient cohort fraction of the subject to determine an estimated survival time of the subject using dependence of (ii).

[0105] The survival time of the training subject may be based on a last follow-up time for the training subject. According to any aspect of the present invention, last follow-up time may refer to the last visit by the subject to a medical practitioner to be examined. It may be 50, 100, 300, 500, 1000, 1500, 2000, 2500 and the like from prognosis of EOC.

[0106] The method may be for determining effectiveness of treatment further comprises the steps of:
[0107] (i) parametrizing a dependence between the copy number of the gene of the training subject and a possible treatment response of the training subject selected from a group consisting of:
   [0108] a complete response;
   [0109] an incomplete response; and
   [0110] a null response; and
[0111] (ii) using the copy number of the subject to determine an estimated possible treatment response of the subject.

[0112] According to one aspect, there is provided at least one kit for diagnosing epithelial ovarian cancer and/or predisposition to epithelial ovarian cancer in a subject, the kit comprising at least one probe that can identify the level of expression and/or copy number of at least one gene in the MECOM locus. The probe may be an oligonucleotide, aptamer, antibody and/or drug that may bind to MDS1 and/or EVI1 gene/protein suitably.

[0113] In particular, the probe may be a drug. A non-limiting example of the drug may be sinefungin (Sigma-Aldrich), deazaneplanocin (Moravek Biochemicals) other inhibitors of histone-methytransferases and their derivatives and the like.

[0114] According to a further aspect, there is provided at least one computer system having a processor arranged to perform a method according to any aspect of the present invention.

[0115] According to another aspect, there is provided a computer program product such as a tangible data storage device, readable by a computer and containing instructions operable by a processor of a computer system to cause the processor to perform a method according to any aspect of the present invention.

[0116] According to a further aspect, there is provided a nucleotide sequence selected from the group consisting of SEQ ID NOs: 1-3, fragments, derivatives, variants and complementary sequences thereof. In particular, EVI1-For and EVI1-Rev are nucleotide sequences of a pair of primers suitable for PCR-based techniques (including, but not limited to quantitative PCR), which may specifically measure expression of EVI1 transcript. Forward primer (termed EVI1-For) sequence 5′-GGTTCCTTGCAGCATGCAAGACC-3′ (SEQ ID NO:1). Reverse primer sequence (termed EVI1-Rev) 5′-GTTCTCTGATCAGGCAGTTGG (SEQ ID NO:2). EVI1-Flu is a nucleotide sequence of a fluorescent probe-FAM6-TACTTGAGGCCTTCTCCAGG-TAMRA (SEQ ID NO:3), which can specifically measure expression of EVI1 transcript. These sequences may be capable of detecting any EVI1 isoform in a sample. In particular, these sequences may be capable of detecting a small quantity of the EVI1 isoform in the sample.

[0117] The primer sequences may comprise, consists of or consists essentially of the sequences of SEQ ID NO:1, 2 or 3.

[0118] Having now generally described the invention, the same will be more readily understood through reference to the following examples which are provided by way of illustration, and are not intended to be limiting of the present invention.

[0119] A person skilled in the art will appreciate that the present invention may be practised without undue experimentation according to the method given herein. The methods, techniques and chemicals are as described in the references given or from protocols in standard biotechnology and molecular biology text books.

### EXAMPLES

[0120] Standard molecular biology techniques known in the art and not specifically described were generally followed as described in Sambrook and Russel, Molecular Cloning: A Laboratory Manual, Cold Springs Harbor Laboratory, New York (2001).

### Clinical Data Description

[0121] The National Institute of Health (NIH) Cancer Genome Atlas (TCGA) database (McLendon, 2008) was used for copy number analysis of patients with ovarian cancer. The data on 514 EOC patients were downloaded from TCGA website. Among them 449 (87%) patients were initially classified to stages 3 and 4 of EOC; 448 (87%) patients received chemotherapy; 44 (8.5%) patients were younger than 45 years old, 21 (4%) were between 45 and 65 years old and 290 (56%) were older than 65. For 484 (94%) patients the time of the last follow-up and for 264 (51%) the time of death were defined.

[0122] For copy number analysis the data on 504 patients (of 514 in total) in TCGA set were available. Among them for 337 samples gene expression data was also available. This group of samples was used for survival analysis.

[0123] The predictive power of MECOM transcripts expression and gene copy number on the efficiency of treatment on 524 patients from TCGA database was tested. The patients were stratified by the type of response to primary therapeutic treatment into 2 classes: 1) 288 patients with complete response, 2) 121 patients with “incomplete response” (including partial response, stable or progressive disease), and 3) 115 patients with no response registered (“null response”), largely due to their deaths earlier than the due time of primary therapy response assessment.

[0124] For gene expression analysis the following publicly available datasets were obtained from Gene Expression Omnibus (GEO) website (Edgar R. 2002), GSE12172 including 90 samples (Anglesio M S, 2008), GSE20656 including 172 samples (Meyniel J P, 2010), GSE14407 including 24 patients (Bowen N J, 2009). Among the 72 patients of GSE12172 dataset, which passed the quality assessment, all the tumors were characterized with serous phenotype, 56 (77%) were classified to stages 3 and 4 of EOC, 50 (72%) tumors were characterized as malignant, 22 (28%) were characterized as LMP (low malignancy potential).

[0125] Among the 116 patients of GSE20656 dataset, which passed the quality assessment, 59 tumors (78% of the 76 tumors with available information) were characterized with serous phenotype, 55 (68% of the 81 tumors with available information) were classified to stages 3 and 4 of EOC, 83 (72%) tumors were identified as primary EOC, 28 (72%) were identified as breast cancer metastases in the ovaries. Among the 24 patients of GSE14407 12 patients were diagnosed with EOC at stages Ic (2 patients), II and IIb (2 patients), III (1 patient), IIIc (5 patients), IV (2 patients). The rest 12 samples were taken from normal ovarian epithelium of patients with subjected to surgical treatment if diseases different from epithelial cancer. Among the 43 ovarian cancer patients of GSE7463 dataset 33 were diagnosed with malignant ovarian carcinomas and 10 with non-malignant adenomas (Moreno C S et al., 2007). Among the malignant ovarian carcinoma patients 24 received neo-adjuvant chemotherapy prior to surgery and 9 did not receive it.

[0126] From GSE9750 microarray data set, expression values of 33 primary cervical cancer tumors and 24 samples from normal cervical epithelium were used (Scotto L et al, 2008). Dataset GSE7305 contained data featuring 10 ovarian endometrium tumors and 10 normal endometrium samples (Hever A et al, 2007). From GSE6344 10 clear cell renal cell carcinoma tumors (5 stage I and 5 stage II) and 10 normal kidney epithelium samples were used (Gumz M L et al, 2007).

[0127] Detailed information on the studied clinical cohorts can be found in Tables 1 and 2 below.

TABLE 1
Ovarian carcinoma vs LMP

| | | No. of |
|---|---|---|
| Parameter | Value | Patients |
| GEO | GSE12172 | 72 |
| Primary.Site | NA | 72 |
| Source Name | OVARIAN CARCINOMA | 50 |
| | OVARIAN TUMOR(LMP) | 22 |
| Grade | 2 | 11 |
| | 3 | 37 |
| | HIGH | 10 |
| | LOW | 8 |
| | NA | 6 |
| stage1 | 1 | 11 |
| | 2 | 5 |
| | 3 | 47 |
| | 4 | 9 |
| stage2 | A | 14 |
| | B | 6 |
| | C | 42 |
| | NA | 10 |
| histotype | SEROUS | 72 |
| tumor/metastasis | METASTASIS | 14 |
| | PRIMARY | 58 |
| LMP/malignant | LMP | 22 |
| | MALIGNANT | 50 |
| subtype 2 | MUTANT BRAF | 9 |
| | MUTANT ERBB2 | 2 |
| | MUTANT KRAS | 10 |
| | NOT MUTATION TESTED | 18 |
| | WILD TYPE (BRAF/KRAS) | 27 |
| | WILD TYPE (BRAF/KRAS/ERBB2) | 6 |
| Micropapillary feature | NA | 54 |
| | NEGATIVE | 9 |
| | POSITIVE | 9 |
| (LMP) implants | MICRO-INVASIVE | 3 |
| | NA | 54 |
| | NEGATIVE | 6 |
| | NON-INVASIVE | 9 |
| Co-exhistant histology | ADJACENT BRENNER TUMOR | 1 |
| | ADJACENT INTRAEPITHELIAL | 1 |
| | CARCINOMA | |
| | ADJACENT LMP | 2 |
| | ADJACENT LMP/MPSC | 1 |
| | ADJACENT SEROUS | 1 |
| | CYSTADENOMA | |
| | NA | 56 |
| | NO NOTED | 10 |
| Cluster info | INV CLUSTER | 48 |
| | LMP CLUSTER | 24 |
| arrayed site | OV | 58 |
| | PE | 14 |

TABLE 2
Ovarian carcinoma vs. Breast cancer metastasis

| | Value | No. of Patients |
|---|---|---|
| GEO | GSE20565 | 116 |
| Primary.Site | OVARY | 116 |
| Source Name | BREAST METASTASIS IN THE OVARY | 27 |
| | OVARIAN CARCINOMA | 76 |
| | PLAUSIBLE BREAST METASTASIS IN TH [symbol] | 7 |
| | PLAUSIBLE OVARIAN CARCINOMA | 6 |
| Grade | 1 | 6 |
| | 2 | 24 |
| | 3 | 53 |
| | NA | 33 |
| stage 1 | 1 | 18 |
| | 2 | 8 |
| | 3 | 44 |
| | 4 | 11 |
| | NA | 35 |
| stage2 | A | 14 |
| | B | 9 |
| | C | 47 |
| | NA | 46 |
| histotype | ADENOCARCINOMA | 2 |
| | BRENNER TUMOR | 1 |
| | CARCINOSARCOMA | 2 |
| | CLEAR CELLS | 6 |
| | ENDOMETRIOID | 6 |
| | MUCINOUS | 6 |
| | NA | 34 |
| | SEROUS | 59 |
| tumor/metastasis | METASTASIS | 33 |
| | PRIMARY | 83 |
| Breast tumor_Age at diagnosis | Median = 48 years | |
| | NA | 103 |
| | 20-39 | 2 |
| | 40-49 | 7 |
| | 50-59 | 2 |
| | 60-69 | 2 |
| | 70-79 | 0 |
| | 80-89 | 0 |
| Breast tumor_Local treatment | BCS | 5 |
| | M | 8 |
| | NA | 103 |
| Breast tumor_Stage | I | 2 |
| | II | 1 |
| | III | 10 |
| | NA | 103 |
| Breast tumor_Systemic treatment | CT | 5 |
| | CT-T | 5 |
| | NA | 103 |
| | NO | 1 |
| | T | 2 |
| Breast_ER | plus | 10 |
| | minus | 3 |
| | NA | 103 |
| Breast_Grade | I | 2 |
| | II | 3 |
| | III | 7 |
| | III, THEN II | 1 |
| | NA | 103 |
| Breast_Histology | IDC | 6 |
| | IDC AND ILC (MIXED) | 1 |
| | IDC, THEN ILC* | 1 |
| | ILC | 4 |
| | NA | 103 |
| | UNDIFFERENTIATED | 1 |
| Breast_PgR | positive | 9 |
| | negative | 4 |
| | NA | 103 |
| Ovarian tumor_Age at diagnosis | Median | 52 |
| | NA | 103 |
| | 20-39 | 1 |
| | 40-49 | 5 |
| | 50-59 | 5 |
| | 60-69 | 1 |
| | 70-79 | 1 |
| | 80-89 | 0 |
| Ovarian tumor_FIGO stage | IC | 1 |
| | IIA | 2 |
| | IIC | 1 |
| | IIIC | 4 |
| | IV | 5 |
| | NA | 103 |
| Ovarian tumor_Metastatic site | BONE, LIVER | 1 |
| | LIVER | 2 |
| | NA | 111 |
| | PERITONEAL CARCINOMATOSIS, SUPRA | 1 |
| | PLEURA | 1 |
| Ovarian tumor_Outcome | DOD | 9 |
| | NA | 103 |
| | NED | 3 |
| | SD | 1 |
| Ovarian tumor_Time interval from BC (months) | Median = 34 | |
| | NA | 103 |
| Ovary_ER | positive | 4 |
| | negative | 2 |
| | NA | 103 |
| | ND | 7 |
| Ovary_grade | II | 2 |
| | III | 4 |
| | NA | 103 |
| | ND | 7 |
| Ovary_Histology | LOBULAR CARCINOMA | 5 |
| | NA | 103 |
| | POORLY DIFFERENTIATED ADK | 3 |
| | SEROUS PAPILLARY | 5 |
| Ovary_Pgr | positive | 3 |
| | negative | 1 |
| | NA | 103 |
| | ND | 9 |

[symbol]

indicates data missing or illegible when filed

[0128] Normalization of the expression values of each dataset was performed with MBEI algorithm (Li C., et al., 2001). ANOVA method (Kerr M. K. et al., 2001) was utilized to adjust the batch effect among three datasets. All procedures described for TCGA expression data analysis were performed in a similar manner in the GEO expression datasets.

### Example 1

### EVI1 Gene Expression is a Discriminative Marker Between Normal and Cancer Ovarian Tissues

[0129] The results are shown in FIG. 1 where the expression of EVI1 and MDS1 genes of MECOM locus were shown to be strongly increased in ovarian cancer cells, in comparison with normal epithelium. In the samples taken from ovarian tissues using laser micro-dissection technique, the average expression of EVI1 and MDS1 genes were 3.6 and 1.4 times higher respectively in cancer tissues, in comparison with neighboring normal tissues (FIG. 1). This difference in the mean expression value is more significant for EVI1, in comparison with MDS1 (P=0.021). MDS1 and EVI1 expression values correlate across all the samples (Pearson's r-0.84, Kendall's T-0.60).

### Example 2

### EVI1 Expression was a Sensitive and Specific Marker of Primary EOC Tumors Among Conventional Diagnostic Biomarkers

[0130] To assess the significance of EVI1 in ovarian cancer, its expression was analyzed in three data sets and its significance as a diagnostic marker was tested against a set of genes, which significance in diagnostics of ovarian cancer and patients survival is widely accepted KRAS, ERBB2, P53, MYC, MUC16 (CA-125) and WFDC2 (HE4). The results against WFDC2 and MUC16 are shown in FIG. 2. As can be seen from the results, MECOM expression discriminates between normal and cancerous ovarian epithelia. The combination of expression values of MECOM genes alone FIG. 2(A) discriminated EOC with False negatives (FN)=1 and False positives (FP)=1, which was comparable to the combination of MUC16 (CA-125) and WFDC2 (HE-4) markers FIG. 2(C). The perfect separation was obtained in the combination of EVI1 and MUC16 genes FIG. 2(B). The overall discriminative power of EVI1 gene for normal vs. EOC epithelia was comparable with MUC16 and WFDC2 FIG. 2(D).

[0131] The expression values of each marker in ovarian tumors emerged from ovarian epithelia (primary tumors) were compared with the corresponding expression values in the ovarian metastases of breast cancer tumors (secondary tumors). In the given arrays the expression of EVI1 was represented by probesets 226420_at for MDS1 (RefSeq MECOM, transcript variant 4, NM_{—}004991.3; SEQ ID NO:4) and 208434_at for EVI1 (RefSeq MECOM, transcript variant 2, NM_{—}005241.3; SEQ ID NO:6) transcripts respectively. The expression cutoff value (given in a log 2 scale) was selected in such way that it minimized the number of false negative diagnoses.

[0132] The results presented on FIGS. 3 and 4 demonstrate that both MDS1 and EVI1 genes can discriminate between primary and secondary ovarian tumors with the highest specificity (P=6.10⁻¹⁴ and P=6.10⁻¹² respectively) among the conventional markers (P53, KRAS, ERBB2, MYC, WFDC2 and MUC16).

[0133] Cumulative distribution curves of gene expression values presented in FIG. 3 to discriminate A) between primary EOC and breast cancer metastases in the ovaries; B) between low malignancy potential tumors and malignant EOC. The larger the difference between the grey and the black cumulative curves observed (by the P-value), the larger the diagnostic value of the given gene. As can be seen in FIG. 3, EVI1 and MDS1 genes of MECOM locus were more sensitive and specific in EOC diagnostics than many conventional biomarkers.

[0134] FIG. 4 shows that both EVI1 and MDS1 genes of MECOM locus are important for diagnostics. Discrimination between Low malignant potential (LMP) and malignant primary EOC as shown in FIG. 4 improved after combining the expression values of EVI1 and MDS1 genes together in a two-dimensional discriminant function.

[0135] At expression cutoff level 8.5 of EVI1 expression the number of false negative (FN) diagnoses of primary EOC was FN_{EVI1}=7 with the number of false positive (FP) FP_{EVI1}=0. For the next powerful biomarker MUC16 (CA-125) at expression cutoff level 6.7 FN_{MUC16}=8 and FP_{MUC16}=5. Thus, for EVI1 gene the specificity=33/(33+0)=100% and the sensitivity=(83−7)/83=91%, while for MUC16 the specificity=33/(33+5)=87% and the sensitivity=(83−5)/83=94%. The robustness of the discrimination between primary and secondary ovarian tumors can be improved by measurement of both EVI1 and MDS1 genes simultaneously as shown in FIG. 4.

[0136] As can be seen, the transcripts of genes of MECOM locus are more sensitive and specific in EOC diagnostics than many conventional biomarkers. The Receiver Operating Characteristic (ROC) curves of FIG. 5 showed the expression of EVI1 gene of MECOM locus as a biomarker for clinical diagnostics in comparison with two currently most successful diagnostic markers WFDC2 (HE-4) and MUC16 (CA-125). The best predictor was defined by the curve closest to the coordinate axes. The worst predictor was defined by the curve closest to the reference line (false positive rate=true positive rate).

[0137] The specificity and the sensitivity of the discrimination between primary and secondary ovarian tumors is further improved by measurement of EVI1 together with transcripts of ERBB family genes and their secreted signalling protein ligands as shown in FIG. 6.

[0138] The secreted ligands (such as EGF, TGFA, NGR1) demonstrated slightly lower sensitivity, in comparison with ERBB family receptors (such as ERBB1, ERBB2, ERBB3) as shown in FIG. 6.

[0139] For EVI1-NGR1 combination the sensitivity was (83−4)/83=95% and the specificity was 100%.

[0140] For EVI1-EGF and EVI1-TGFA combinations the sensitivity was (83−3)/83=98% and the specificity was 33/(33+1)=97%.

[0141] For EVI1-ERBB1 and EVI1-ERBB2 combinations the sensitivity was (83−2)/83=98% and the specificity was 100%.

[0142] For EVI1-ERBB3 combination the sensitivity was (83−1)/83=99% and the specificity was 100%.

### Example 3

### EVI1 Expression was a Sensitive Marker of EOC Tumor Malignancy Potential

[0143] In respect to the malignancy potential of the tumors EVI1 gene was ranked 5th (P=0.022), surpassing biomarkers MYC (P=0.03), WFDC2 (P=0.32) and ERBB2 (P=0.74) in the group discrimination significance.

[0144] For EVI1 at expression level cutoff 9.5 FN_{ENVI1}=18, FP_{ENVI1}=4, the specificity=21/(21+4)=84% and the sensitivity=49/(49+18)=73%, while for MUC16 (CA-125) at expression cutoff level 9.7 FN_{MUC16}=11, FP_{MUC16}=5, the specificity=21/(21+5)-81% and the sensitivity=49/(49+11)=82% The advantage of EVI1 as a clinical diagnostic biomarker proposed in the current innovation over the two certified clinical biomarkers MUC16 (CA-15) and WFDC2 (HE4) in the full range of cutoff values separating the patient groups is presented on the comparative plots of ROC curves on FIG. 6. Discrimination between primary EOC tumors and breast cancer metastases in the ovaries was improved after combining the expression values of EVI1 and ERBB1 genes together in a two-dimensional discriminant function as shown in FIG. 6. A combination of EVI1 and ERBB1 expression was shown to be the most sensitive marker of primary EOC.

### Example 4

### The Prognostic Significance of MDS1 Gene Expression Depends on the Number of its Gnomic Copies in Tumor Tissues, while EVI1 Expression is Survival Significant Regardless of its Gene Copy Number

[0145] The prognostic significance of the expression of EVI1 and, especially, MDS1 was strongly dependent of the copy numbers of their genomic regions in the patients. Survival analysis of the patients with EOC diagnosed at stages 3 and 4 demonstrated that EVI1 is one of the three genes, which expression level separates the patients into two groups with significantly different survival times. As a survival prognostic marker, the expression of EVI1 gene with P=0.010 ranked second after PIK3CA (P=0.0021). The survival significance of MDS1 gene expression with P=0.049 was marginal, ranking behind PIK3CA, EVI1, WFDC2, MUC16, KRAS, and MYC, but better than ERBB2, P53 and BRCA2.

[0146] In the studied population EVI1 gene was represented in more than 2 copies per genome in 52% (262/504) of the patients. The values of both average copy number and the fraction of the patients exceed the corresponding values (50 to 70%) reported previously for EOC tumors (Sunde J S, 2006). The site of copy number at the 3′ end of MECOM locus was the most highly amplified region on chromosome 3 reaching the strongest gene amplification hot spot in the genomes of EOC tumor cells as shown in FIG. 7. The 3′ end of the MECOM locus copy number was 2.5 and higher in the tumors of 84% of patients with EOC. Across the patients, EVI1 region was characterized with mean 3.52 and median 3.19 copies per genome, and MDS1 region with mean 3.39 and 3.18 copies respectively as shown in FIG. 8.

[0147] The effect of EVI1 and MDS1 expression was analysed in the tumors on the survival of patients as factors depending on the genomic amplification of these genes. The effect of EVI1 and MDS1 copy numbers was studied by separating the population of patients into two groups relative to a given copy number cutoff: the patients with a large number of EVI1 or MDS1 copies (the genes are amplified) in their tumors and the rest of the patients (the genes are not amplified). The results are presented on FIGS. 8C and D. Survival analysis of EVI1 and MDS1 expression was performed in the high copy number group and the best P-values for the survival groups separated by the expression were calculated. The copy number cutoff value varied from 0 to 4. Thus copy number-dependent expression-defined survival P-value was calculated. FIG. 8(A) shows the comparison of the best separation of the patient survival curves by gene expression markers (grey-high expression, black-low expression); the more separated grey and black curves were (the less the p-value), the more predictive power for patient survival a given marker had. Histograms in FIG. 8(B) are of amplification values of EVI1 and MDS1 genes of MECOM locus obtained. The dependence of the p-value of the best survival curves separation (Pmin) on the degree of amplification of the genes from MECOM locus obtained are shown in FIG. 8(C). FIG. 8(D) are survival curves which show the maximal separation of patients for the subsets of patients with EVI1 and MDS1 obtained. The amplification higher (the upper row) and lower (the middle row) than 3.5 and 3.6 copies/cell were obtained respectively. As a reference of survival curves separation the combined (amplified together with not amplified) are given in the bottom row. In FIGS. 8(A) and (D) the cutoff expression value (in log 2 scale) are denoted with letters above each of the graphs (within the graph frames). For FIG. 8A and the ‘Combined’ graphs in FIG. 8(D) the cutoff was obtained with a single one-dimensional optimization by the expression value. In FIG. 8(D) the analysis was made with a two-step optimization by 1) copy number, followed by 2) expression. It is shown that amplification of MECOM locus together with the expression of its genes EVI1 and MDS1 were stronger indicators of EOC patients' survival prognosis than many conventional biomarkers.

[0148] The copy number cutoff giving the best survival P-value for EVI1 and MDS1 was slightly different (3.5 and 3.6 respectively), although these loci are adjacent. In the group of patients, where MDS1 copy number was higher than 3.6, the expression of MDS1 was a strong factor separating the patients by survival (P=0.0028), showing a remarkable improvement of the P-value by a factor of 17, in comparison with the whole population (P=0.049). In the sub-population where MDS1 was not amplified, no survival significance of its expression was observed (P=0.39).

[0149] MDS1 expression was a significant factor of EOC patients' survival only if in their tumors MDS1 gene region copy number was higher than 3.6 (227/354, 65% of the patient population). At the same time, EVI1 gene expression was a significant factor of patients' survival for the whole population (P=0.010), regardless of the level of the amplification of its coding region. The results are shown on FIG. 8D.

[0150] The survival prognostic value of both EVI1 and MDS1 gene depended on their copy number (i.e. the copy number of MECOM locus, which includes both of them). As displayed on FIG. 80D, after segregation of the patients (“Combined”) into 2 cohorts (“Amplified” and “Not amplified”) by the genes copy number, the prognostic P-value for EVI1 was improved. In addition, for EVI1 gene the prognostic value was marginally significant even without prior patient stratification (“Combined” cohort) by copy number values. Thus, EVI1 gene expression can be used as a prognostic marker regardless its copy number status.

[0151] The results demonstrated that MECOM locus, including proto-oncogenes EVI1 and MDS1, was a clinical biomarker for differential diagnostics and prognosis of the human epithelial ovarian cancer.

### Example 5

### EVI1 and MDS1 were Strong Prognostic Factors for Shorter Survival Periods

[0152] The P-value of the difference between MECOM copy number distributions for patients with good (survival) and poor (death) prognoses for a given limited time period had a log-linear dependence on the time limit with a strong positive correlation as shown in FIG. 14. Detailed correlation structure of surviving (good prognosis) and deceasing (poor prognosis) patient cohorts were defined by follow-up time. Both MDS1 and EVI1 expression P-value (between good and poor prognosis cohorts) correlated with patients' follow-up time. For MDS1 two ranges of follow-up times with different correlation coefficients were observed.

[0153] For both EVI1 and MDS1 the functional dependence of P-value on the survival time limit consists of two trends with very strong correlation separated by a region of discontinuity around time 1200 days. For time periods shorter than 500 days correlation between P-value and copy number decreases, while MECOM copy number became a stronger marker, in comparison with all conventional cancer biomarkers as can be seen when comparing FIGS. 9 and 10. As can be seen in FIG. 9, expression of EVI1, but not MDS1 gene showed a strong survival significance for the given prognosis time span. Based on FIG. 9, EVI1 was shown to be the most powerful marker for discriminating between poor and good prognosis patients at a short prognostic time period (300 days). As can be seen in FIG. 10, expression only of either EVI1 or MDS1 did not have a sufficient survival prognostic power for the given prognosis time span. However, the expression of both genes was highly significant for patients (91%) with tumors with amplified MECOM locus (copy number >2.9). EVI1 was thus shown to be a marginally significant marker for discriminating between poor and good prognosis patients at medium prognostic time period (1500 days).

### Example 6

### The Genes of MECOM Locus (EVI1 and MDS), being Analyzed Simultaneously, Improve the Discriminative Power of Clinical Analysis

[0154] The combination of expression data of MDS1 with EVI1 could be used together for increasing the discrimination power of ovarian tumor subtypes in. This possibility is illustrated on FIG. 3B by a comparison of the cumulative frequency distribution of the genes expressed in low malignancy potential (LMP) tumors versus malignant EOC. On this figure it can be observed that higher expression values of EVI1 gene of MECOM locus correspond to malignant EOC type. Contrary to this, higher expression values of MDS1 gene of this locus correspond to LMP ovarian tumor type. Thus, the maximal instrumental sensitivity (with both genes measured at high expression) of the measurement is obtained. If MDS1 and EVI1 expression was measured together, the power of the resulting two-dimensional discriminant function to separate the LMP and malignant EOC subgroups was increased, as shown on FIG. 4.

### Example 7

### EVI1 and MDS1 Copy Number were Predictive Markers of Primary Therapy Outcome

[0155] The P-value was studied for the difference between EVI1 and MDS1 copy number distributions for patient groups with good prognosis and poor prognosis. For a given follow-up time cutoff the poor prognosis group was limited to the patients who died before this follow-up time. The good prognosis group was limited to the patients who survived longer than the given follow-up time.

[0156] These P-values were found to be different for patients grouped by primary therapy outcome success (“complete”, “incomplete” and “null” response patient cohorts), as seen, e.g. on FIGS. 9 and 10. Moreover, the P-values for both EVI1 and MDS1 strongly correlated with the fraction of patients belonging to each cohort in the poor prognosis group as shown in FIG. 11 which shows that the primary therapy response outcome depends on EVI1 and MDS1 copy numbers.

[0157] The correlation structure for each cohort was complex. For EVI1, with increase of the cohort patient fraction up to a certain limiting value (10% for “complete”, 40% for “incomplete” and 50% for “null” response groups for EVI1) the correlation with P-value was strongly negative (−0.58 for “complete”, −0.6 for “incomplete” and −0.89 for “null” response groups for EVI1). After this limit, the correlation changed to strongly positive for “complete” and “null” response groups, but remained negative for “incomplete” response group. For MDS1 the correlation structure was qualitatively similar. Thus, an ‘optimal’ fraction of patients for a certain therapy response was defined by the expected minimal P-value of EVI1 (or MDS1) copy number distribution different between the group of the patients with good and poor survival prognosis.

[0158] This demonstrated a dependence of primary therapy outcome response on the copy number of EVI1 and/or MDS1 in the tumor tissue of a given patient, along with survival prognostic time period. It became evident that every distribution of EVI1 and MDS1 values predicted the ‘optimal’ fraction of patients with a given time of response. This optimal corresponded to the maximal dependence of therapy response outcome (as survival probability) of patients in a given cohort on the expression of EVI and/or MDS1.

[0159] The expression value of EVI1 and/or MDS1, measured at the time of the surgery, simultaneously mapped each individual patient to the probability distribution of the difference between good and poor survival groups, patient survival probability and the probability of having a “complete”, “incomplete” and “null” response and the expected survival time. Thus for a given patient primary therapy outcome could be predicted, along with the survival time estimated from this prediction. An example of this analysis is shown on FIG. 17 which includes the algorithm for primary therapy outcome prediction and associated patient survival prognosis based on EVI1/MDS1 copy number data.

[0160] The specific steps include:

1. Measure EVI1/MDS1 copy number in the tumor extracted during surgery. Map the copy number on the copy number distribution of EVI1/MDS1.
2. For the given copy number find its quantile Q in the copy number distribution. Optional: for a given copy number find its quantile in the copy number distribution in each response cohort (“Complete”, “Incomplete” and “Null”) separately. These alternative quintiles will lead to 3 alternative prediction scenarios, the results of which at Step 7 can be combined.
3. Map Q to the “response cohort class composition” vs. Q (copy number) nomogram (FIG. 11)
4. From the points of intersection of line “y=Q” with the approximated cohort fraction −log(Q) dependence the corresponding values on Ox axis are estimated for each cohort. Thus the inference of the plausibilities of the given patient belonging to each of the cohorts (Ox axis) is made. Up to 6 potential expected cohort fraction values (6 plausibility values) can be obtained at this step if all the intersection points are within [0,1] range. Similarly to Step 2, these values can be traced further to be resolved at Step 7.
5. Map the obtained set of expected cohort fraction values (plausibilities) to “Last follow-up time” vs. “cohort fraction” nomogram (FIG. 15A).
6. For every given expected cohort fraction (plausibility) find the points of intersection of the corresponding lines “with the nomogram curves for each corresponding primary therapy outcome prediction cohort. Obtain the corresponding values of expected survival times on Ox axis for each cohort fraction.
7. Obtain the predicted survival time based on the primary therapy outcome predictions by inferring it from the plausible survival times obtained at Step 6. For example, at Step 2, 6 points of intersection (2 points for each of the 3 quintiles were obtained). At Steps 5 and 6 each point was mapped to a single expected survival time. Thus 6 survival times was obtained. If the goal is to obtain the prediction at the time of obtaining copy number data (i.e. at the time of surgery), a range between the minimal and the maximal of the 6 survival times can be retrieved as a prediction.
8. The set of plausible survival times (up to 6) can be reduced to the set of 2 survival times if the survival prognosis is made for the patient after the outcome of the primary therapy is observed. Then, the certainty in the patient primary therapy outcome cohort is obtained and thus the range of survival times is reduced to the smallest and the largest predicted values for the given cohort.

[0161] Primary therapy response strongly correlated with patient last follow up time FIG. 15(A), which, in its turn, correlates with EVI1 FIG. 15(B) and MDS1 FIG. 15(C) −log 10 of P-values for expression differentiating between patients with good and poor prognosis. Good and poor prognosis cohorts for a given follow-up time are defined by patient survival or death by the given follow-up time.

### Example 8

### EVI1 and MDS1 were Predictive Markers for Secondary Therapy Outcome

[0162] For a short-term survival period (600 days) survival, patients who did not receive secondary chemotherapy, died significantly more often (EVI1 P=0.01, MDS1 P=0.003) if their tumors contained high copy number of MECOM. The 12 secondary therapy outcome prediction results is shown in FIG. 12. Among the patients who received secondary chemotherapy, MECOM copy number was an insignificant factor of survival. FIG. 12(A) show the results of patients who received chemotherapy and FIG. 12(B) show the results of patients who did not receive chemotherapy.

[0163] EVI1 expression was insignificantly different among the patients, regardless of their receiving chemotherapy. However, MDS1 expression was marginally higher (P=0.04) in the group of patients with poor prognosis who received secondary chemotherapy.

### Example 9

### EVI1 and MDS1 Expression and Copy Number were Strong Long-Term Prognostic Factors in Each Group of Patients Separated by Response Type to Primary Therapy

[0164] Combinations of EVI1 and MDS1 copy number and expression values separate groups of patients with various types of response to primary therapy. These markers can be also considered as factors increasing the prognostic power of primary therapy outcomes 13. A schema for a robust survival prognosis using a combination of MECOM copy number and EVI1 and MDS1 expression with primary therapy response outcome is shown in FIG. 13. For patients with complete response and MECOM copy number between 2.8 and 4.2, EVI1 expression less than 10.3 and MDS1 expression less than 6.76 long survival time was predicted, while for patients with EVI1 and MDS1 expression higher than these values medium survival time was predicted (up to 2000 days).

[0165] For patients with partial and no response (stable or progressive disease) to primary chemotherapy, if MECOM copy number was less than 2.7 and MDS1 expression was less than 6.43, medium survival time as predicted. For patients with MECOM copy number >2.7 and EVI1 expression less than 9.51, medium survival time was predicted.

[0166] Short survival time (maximum 1000 days) was predicted for patients without complete response to primary chemotherapy, MECOM copy number <2.7 and MDS1 expression higher than 6.43, or, in the case of MECOM copy number >2.7, if EVI1 expression >9.51. Overall, lower MECOM copy number and EVI1 and MDS1 expression, as well as complete response in survival time resulted in prognosis of longer survival times.

### Example 10

### The Prognostic Power of MECOM Copy Number was the Strongest for Patients with Shortest Surviving Times and Predicted for them Negative Outcome of Primary Therapy

[0167] From FIG. 15, the P-value of difference between MECOM copy number distributions for patients with good and poor prognoses correlated not only with the prognostic period, but also with primary therapy response group composition of the patients. As the fraction of patients with partial and complete response increased, both survival time and the copy number P-value increased. Contrary to this, the MECOM copy number (and EVI1 expression value) was the most significant survival-predicting factor for the short periods of time (<300 days, as shown on FIG. 9), when most of the patients belonging to the “Null” therapy response group died. −log 10 of P-values for expression differentiated between patients with good and poor prognosis. Good and poor prognosis cohorts for a given follow-up time were defined by patient survival or death by the given follow-up time.

[0168] Thus, regarding the prognostic value of MECOM copy number (and also EVI1 and MDS1 expression) and survival of patients grouped by primary therapy response, the prognosis time scale could be divided into 3 ranges (FIG. 15A). Short term prognostic range, up to 500 days long, was characterized with the strongest prognostic power of MECOM copy number and the expression of its genes, as well as with the prevalence of the “Null”-therapy responding patients. Medium term prognostic range, spanning from 500 to 1500 days—was characterized with poor prognostic power of MECOM copy number and the expression of its genes (where some conventional cancer biomarkers show stronger prognostic power than MECOM), as well as prevalence of the mixed group of “Incomplete” primary therapy response (combining patients with partial response and stable or progressing disease). Long term prognostic range as characterized with MECOM copy number-dependent prognostic power of EVI1 and MDS1 expression (stronger than for conventional cancer biomarkers) and with prevalence of patients with complete response to primary therapy.

### Example 11

### EVI1 and MDS1 were Markers for Anti-Cancer Therapy Success Prediction

[0169] EVI1 expression value was a significant marker (P(Mann-Whitney U)-0.0021) for predicting the outcome of primary post-operative therapeutic treatment response at the time of surgery as shown in FIG. 16A. MDS1 expression was insignificant with a trend to significance (P=0.074). In comparison with conventional cancer markers (e.g. P(MUC16)=0.7), P(WFDC2)=0.1, P(KRAS)=0.49, P(P53)=0.4, P(ERBB2)=0.37), only EVI1 expression demonstrated a statistically significant P-value and MDS1 expression ranked second after EVI1. EVI1 and MDS1 transcription was a significant prognostic factor in combination with patients with complete response to the primary therapy (“Complete response” group) are compared with a combined group containing patients demonstrating partial response, stable or progressive disease (“Incomplete response”). FIG. 16(A) show the cumulative distribution functions of EVI1 and MDS1 gene expression values for “Complete response” (black dots) and “Incomplete response” (grey dots). FIG. 16(B) show that EVI1 and MDS1 copy number (MECOM locus) and expression values as survival prognostic markers for patients with complete response to primary therapy. FIG. 16(C) show EVI1 and MDS1 copy number (MECOM locus) and expression values as survival prognostic markers for patients with partial response to primary therapy, stable or progressive disease.

[0170] The prognostic value of EVI1 and MDS1 for primary therapy response was further confirmed by studying patients segregated by primary response types. Both genes were significant for survival prognosis in both patient groups (i.e. complete and “incomplete” response) for. MDS1 was a significant prognostic marker for 42% of patients with complete response (P=0.0010) and 64% of patients with “incomplete” response (P=0.0045). EVI1 was a significant prognostic marker for 82% of patients with complete response (P=0.0048) and 50% of patients with “incomplete” response (P=0.018).

[0171] An illustration of primary therapy success prediction is given on FIG. 13. On the first stage the prediction of primary therapy success is made based on initial data on MECOM copy number and MDS1 and EVI1 expression values obtained from the analysis of tumor sample extracted during the surgery. Based on this data an appropriate course of therapy is selected (more intensive in the case of MECOM amplification and less intensive otherwise). On the second stage, the response to primary therapy is assessed. Based on the type of response further decision is made on the more exact prognosis of survival time of the patient based on the exact range of MECOM copy number and MDS1 and EVI1 expression values.

### Example 12

### EVI1 Expression is Decreased after Treatment with Neo-Adjuvant Chemotherapy

[0172] Nine samples of malignant epithelial ovarian cancer tumors were compared with 24 samples of epithelial ovarian cancer tumors obtained from patients who received neo-adjuvant chemotherapy prior to the surgerical treatment (13. Moreno CS, 2007). Expression of EVI1 was measured with probesets 1881_g_at and 1882_g_at probesets of Affymetrix HG-U95Av2 microarray. Both probesets demonstrated a significant difference (P=0.0032 and P=0.032 respectively) in expression level of EVI1 between the two groups. The data is presented in FIG. 18. In the same cohort of patients it was also observed that EVI1 expression was different in benign (adenoma) compared to malignant ovarian tumors (FIG. 19). In the latter case, the difference was more significant (P=0.0014 and P=0.007 respectively) and suggests that treatment inefficiency and high malignancy are associated with high expression of EVI1.

### Example 13

### EVI1 Expression is a Potenltal Diagnostic Marker for a Range of Genitourologlcal Tumors.

[0173] EVI1 expression was found to be altered in some other gynecological tumors. In cervical cancer (Scotto L, 2008] EVI1 expression profile qualitatively resembled the one in EOC and EVI1 level was significantly elevated ((P=1.1E−6) in cervical cancer tumors compared to normal cervical epithelium (FIG. 20). Contrary to this, in endometriosis tumors (Hever A, 2007) EVI1 transcript expression was not only significantly lower (P=0.00016) than in normal endometrium, but also was a discriminative (100% specificity and sensitivity) characteristic of this tumor (FIG. 21). In this test MDS1 transcript revealed a similar significance (P=0.00021) and a comparable discriminative power (100% sensitivity, 90% specificity).

[0174] Similarly, in clear cell renal cell carcinomas (Gumz ML, 2007) high EVI1 expression was associated with normal epithelium (P=0.00016) with 100% specificity and sensitivity (FIG. 22).

### Example 14

### Primers Proposed in the Present Invention to Measure EVI1 Expression are Specific and Sensitive Biomarkers for Both Diagnostics and Survival Prognosis of Ovarian Cancer.

[0175] primer sequences suitable for PCR-based techniques (including, but not limited to qPCR) and the sequence for a fluorescent probe, which can specifically measure the expression level of EVI1 were designed. A forward (EVI1-For) sequence 5′-GGTTCCTTGCAGCATGCAAGACC-3′ (SEQ ID NO:1) and reverse primer (EVI1-Rev) sequence 5′-GTTCTCTGATCAGGCAGTTGG-3′ (SEQ ID NO:2) along with fluorescent probe (EVI1-Flu) FAM6-TACTTGAGGCCTTCTCCAGG-TAMRA (SEQ ID NO:3), were designed targeting EVI1 isoform. The EVI1 isoform was selected from the group consisting of SEQ ID NO:4, 5 and 11-15. Primers were designed for endogenous control beta actin (Forward-CAGCCATGTACGTTGCTATCCAGG (SEQ ID NO:7), Reverse-AGGTCCAGACGCAGGATGGCATG (SEQ ID NO:8) and fluorescent probe-FAM-actggcatcgtgatggactc-TAMRA SEQ ID NO:9)) for relative quantification studies. Each primer concentration was optimized and subsequently used on tissue array qPCR panel I and II for gene expression studies. PCR reaction was run on 7500 ABI machine using Taqman universal master mix (cat.no: 4304437) and CT values were obtained and relative quantification was estimated using ddCT method (Livak K J, 2001).

[0176] The obtained fold change values were used for the analysis. Two panels of actin normalized commercial ovarian cancer tissue array qPCR plates (96 wells) HORT01, HORT02 (Origene technologies) were used for primer validation. Each panel contains 48 patient samples of cDNA (normalized with actin) that included normal and stage specific ovarian cancer patients for relative comparison of gene expression of various potential biomarkers. Both panels had unique patient ID's and a total of 15 normal and 81 ovarian patient sample cDNA with various stages enlisted as follows: stage IA=11, stage IB=6, stage IC=7, stage IIA=3, stage IIB=6, stage IIC=3, stage IIIA=11, stage IIIB=11, stage IIIC=14, stage IV=9. Primer3 open source software was used to design forward and reverse primers along with fluorescent probes for qPCR studies.

[0177] Fold change distribution analysis (FIG. 23) demonstrated that the primers, measuring EVI1 expression, with 100% specificity and sensitivity discriminate between normal ovarian surface epithelium and ovarian cancer tumors at any stage (P-values ranging from 6E-13 to 2E-6 on FIG. 23B) and can be used to determine favourable and unfavorable survival prognoses of the patients (P=0.011) by the optimal EVI1 expression cutoff (Fold change to normal ovarian epithelium 16.76 on FIG. 23C).

### REFERENCES

[0178] 1. Anglesio M S, Arnold J M, George J, Tinker A V, Tothill R, et al. (2008) Mutation of erbb2 provides a novel alliterative mechanism for the ubiquitous activation of ras-mapk in ovarian serous low malignant potential tumors. Mol Cancer Res 6: 1678-90.
[0179] 2. Bowen N J, Walker L D, Matyunina L V, Logani S, Totten K A, et al. (2009) Gene expression profiling supports the hypothesis that human ovarian surface epithelia are multipotent and capable of serving as ovarian cancer initiating cells. BMC Med Genomics 2: 71
[0180] 3. Edgar R (2002) Gene expression omnibus: Ncbi gene expression and hybridization array data repository. Nucleic Acids Research 30: 207.
[0181] 4. Jazaeri A A, Ferriss J S, Bryant J L, Dalton M S, Dutta A (2010) Evaluation of evi1 and evi1s (delta324) as potential therapeutic targets in ovarian cancer. Gynecol Oncol 118: 189-95.
[0182] 5. Kerr M K, Churchill G A (2001) Statistical design and the analysis of gene expression microarray data. Genet Res 77: 123-8.
[0183] 6. Li C, Hung Wong W (2001) Model-based analysis of oligonucleotide arrays: model validation, design issues and standard error application. Genome Biology, 2(8):research0032.1-0032.11
[0184] 7. McLendon R E, Friedman A H, D B D (2008) Comprehensive genomic characterization defines human glioblastoma genes and core pathways. Nature 455:1061-8.
[0185] 8. Meyniel J P, Cottu P H, Decraene C, Stem M H, Couturier J, et al. (2010) A genomic and transcriptomic approach for a differential diagnosis between primary and secondary ovarian carcinomas in patients with a previous history of breast cancer. BMC Cancer 10: 222
[0186] 9. Sambrook and Russel, Molecular Cloning: A Laboratory Manual, Cold Springs Harbor Laboratory, New York (2001).
[0187] 10. Sunde J S, Donninger H, Wu K, Johnson M E, Pestell R G, et al. (2006) Expression profiling identifies altered expression of genes that contribute to the inhibition of transforming growth factor-beta signaling in ovarian cancer. Cancer Res 66: 8404-12
[0188] 11. http://www.ncbi.nlm.nih.gov/UniGene/clust.cgi?ORG.Hs&CID-659873
[0189] 12. Nanjundan M, Nakayama Y, Cheng K W, Lahad J, Liu J, Lu K, Kuo W L, Smith-McCune K, Fishman D. Gray J W and Mills G B. Amplification of MDS1/EVI1 and EVI1, Located in the 3q26.2 Amplicon, Is Associated with Favorable Patient Prognosis in Ovarian Cancer. Cancer Res, 2007 67:3074-3084
[0190] 13. Moreno C S, Matyunina L, Dickerson E B, Schubert N, Bowen N J, Logani S, Benigno B B and McDonald J F. Evidence that p53-mediated cell-cycle-arrest inhibits chemotherapeutic treatment of ovarian carcinomas. PLoS One. 2007 2:e441
[0191] 14. Scotto L, Narayan G, Nandula S V, Arias-Pulido H, Subramaniyam S, Schneider A, Kaufmann A M, Wright J D, Pothuri B, Mansukhani M and Murty W. Identification of copy number gain and overexpressed genes on chromosome arm 20q by an integrative genomic approach in cervical cancer: potential role in progression. Genes Chromosomes Cancer. 2008 47:755-65
[0192] 15. Hever A, Roth R B, Hevezi P, Marin M E, Acosta J A, Acosta H, Rojas J, Herrera R, Grigoriadis D, White E, Conlon P J, Maki R A and Zlotnik A. Human endometriosis is associated with plasma cells and overexpression of B lymphocyte stimulator. Proc Natl Acad Sci USA. 2007 104:12451-6
[0193] 16. Gumz M L, Zou H, Kreinest P A, Childs A C, Belmonte L S, LeGrand S N, Wu K J, Luxon B A, Sinha M, Parker A S, Sun L Z, Ahlquist D A, Wood C G and Copland J A. Secreted frizzled-related protein 1 loss contributes to tumor phenotype of clear cell renal cell carcinoma. Clin Cancer Res. 2007 13:4740-9
[0194] 17. Livak K J and Schmittgen T D. Analysis of relative gene expression data using real-time quantitative PCR and the 2(-Delta Delta C(T)) Method. Methods. 2001 25:402-8.

1-30. (canceled)

31. An in vitro method for obtaining information in relation to a medical condition in a subject, the method comprising determining in a sample of the subject:
(i) gene expression level of at least one gene in MECOM locus; and/or
(ii) copy number of at least one gene in the MECOM locus;
wherein the level against at least one expression cutoff value and/or copy number against at least one copy number cutoff value are indicative of said information, and the information selected from the group consisting of:
(i) whether the subject has epithelial ovarian cancer and/or a predisposition to epithelial ovarian cancer;
(ii) survival prognosis of the subject with epithelial ovarian cancer;
(iii) the effectiveness of treatment of epithelial ovarian cancer in the subject;
(iv) whether epithelial ovarian cancer in the subject is of primary or secondary origin; or
(v) whether the subject has cervical cancer, endometriosis, dear cell renal carcinoma and/or a predisposition to cervical cancer, endometriosis, dear cell renal carcinoma.

32. The method according to claim 31 wherein the information is in relation to epithelial ovarian cancer which is adenocarcinoma or malignant ovarian cancer.

33. The method according to claim 31, wherein the information is in relation to epithelial ovarian cancer which is primary epithelial ovarian cancer.

34. The method according to claim 31, wherein the gene expression level is determined by measuring the mRNA or protein expression of the gene from the MECOM locus.

35. The method according to claim 31, wherein the method comprises determining the gene expression level of EVI1 and/or MDS1 from the MECOM locus in the sample.

36. The method according to claim 31, wherein the method comprises determining the gene expression level of at least one further gene selected from the group consisting of MUC16, WFDC2, ERBB1, ERBB2, ERBB3, EGF, NGR1, and TGFA, in the sample.

37. The method according to claim 31, wherein the method comprises determining the copy number of EVI1 and/or MDS1 from the MECOM locus in the subject.

38. The method according to claim 31, further comprising a training stage prior to diagnosis of the subject, determining survival prognosis and/or determining effectiveness of treatment, the training stage comprising the following steps for the gene in the MECOM locus:
for each of a plurality of training subjects with known diagnosis relating to ovarian cancer, determining gene expression level of the gene in the training subject; and
determining an expression cutoff value which divides the training subjects into two groups according to whether the gene expression level of the gene in each training subject exceeds the expression cutoff value;
wherein the training subjects comprise two sets of training subjects, each set associated with a different diagnosis and the expression cutoff value minimizes a difference between the division of the training subjects into the two groups and a division of the training subjects into the two sets.

39. The method according to claim 31, further comprising a training stage prior to diagnosis of the subject, determining survival prognosis and/or determining effectiveness of treatment, the training stage comprising the following steps for each said gene in the MECOM locus:
(i) for each of a plurality of training subjects with known diagnoses relating to ovarian cancer, determining gene expression level and copy number of the gene in the training subject;
(ii) estimating a sample copy number and dividing the training subjects into two cohorts according to whether the copy number of the gene in each training subject is above or below the sample copy number;
(iii) for each said cohort, determining a sample expression value which divides the training subjects in the cohort into two groups according to whether the gene expression level of the gene in each training subject exceeds the sample expression value, wherein the sample expression value achieves a maximum measure of difference between the two groups;
(iv) repeating steps (ii)-(iii) by varying the sample copy number in a range of copy numbers Identified in the training subjects and obtaining a copy number distribution curve for the gene; and
(v) selecting a copy number cutoff value as the copy number associated with the largest maximum measure of difference between the two groups of a cohort and selecting expression cutoff values as the expression values determined for the cohorts obtained with the copy number cutoff value.

40. The method according to claim 39, wherein the measure of difference between the two groups comprises a measure of difference between survival curves of the two groups.

41. The method according to claim 39, wherein diagnosis of the subject, determining survival prognosis and/or determining effectiveness of treatment further comprises the following steps for each said gene in the MECOM locus:
comparing the copy number of the gene of the subject against the copy number cutoff value for the gene;
wherein
if the copy number of the gene of the subject exceeds the copy number cutoff value for the gene, further comparing the gene expression level of the gene of the subject against the expression cutoff value determined for the cohort with copy numbers of the gene above the copy number cutoff value;
if the copy number of the gene of the subject is below the copy number cutoff value for the gene, comparing the gene expression level of the gene of the subject against the expression cutoff value determined for the cohort with copy numbers of the gene below the copy number cutoff value; and
obtaining diagnosis the subject, determining survival prognosis and/or determining effectiveness of treatment based on the comparison between the gene expression level of the gene of the subject and the respective expression cutoff value.

42. The method according to claim 41, for determining survival prognosis of the subject, wherein the method further comprises the steps of:
(i) parameterization of a dependence between a patient cohort fraction and the copy number of the gene in the set of training subjects;
(ii) parameterization of a dependence between the patient cohort fraction and the survival time in the set of training subjects; and
(iii) using the copy number of the subject to determine the patient cohort fraction from the dependence of (i) and using the patient cohort fraction of the subject to determine an estimated survival time of the subject from dependence (ii).

43. The method according to claim 42, wherein the survival time of the training subject is based on a last follow-up time for the training subject.

44. The method according to claim 41 for determining effectiveness of treatment further comprises the steps of:
(i) parametrizing a dependence between the copy number of the gene of the training subject and a possible treatment response of the training subject selected from a group consisting of:
a complete response;
an incomplete response; and
a null response; and
(ii) using the copy number of the subject to determine an estimated possible treatment response of the subject.

45. The method according to claim 31, wherein the information is in relation to the epithelial ovarian cancer, and the method is capable of determining whether the ovarian cancer in the subject is primary or secondary ovarian cancer.

46. The method according to claim 31, wherein the information is in relation to the epithelial ovarian cancer, and the method is capable of determining whether the ovarian cancer has a malignancy potential in the subject.

47. The method according to claim 31, wherein the information is the effectiveness of the treatment of epithelial ovarian cancer in the subject, and the treatment is selected from the group consisting of chemotherapy, surgery and post-surgery chemotherapy.

48. The method according to claim 31, wherein the information is whether epithelial ovarian cancer in the subject is of primary or secondary origin, and whether the cancer of secondary origin is a secondary breast cancer metastatic cancer.

49. A kit for diagnosing epithelial ovarian cancer, cervical cancer, endometriosis, dear cell renal carcinoma and/or predisposition to epithelial ovarian cancer, cervical cancer, endometriosis, dear cell renal carcinoma in a subject, the kit comprising at least one probe that can identify the level of expression, copy number and/or protein expression of at least one gene in the MECOM locus.

50. The kit according to claim 49, wherein the probe is at least one aptamer that binds to EVI1 and/or MDS1 proteins.

51. The kit according to claim 49, wherein the probe is at least one antibody that binds to EVI1 and/or MDS1 proteins.

52. The kit according to claim 51, wherein the probe is at least one drug that directly interact or binds to EVI1 and/or MDS1 proteins.

53. The kit according to claim 49, wherein the copy number is determined using at least one method selected from the group consisting of quantitative PCR assay, in situ hybridization, Southern blotting, multiplex ligation-dependent probe amplification (MLPA) and Quantitative Multiplex PCR of Short Fluorescent Fragments (QMPSF).

The application's sequence listing, which the Patent Office published only in electronic form, follows.

SEQUENCE LISTING (15 sequences)

SEQ ID NO: 1 - DNA, 23 bp, Artificial Sequence
  Synthesised sequence
  misc_feature: EVI1 forward sequence
ggttccttgcagcatgcaagacc

SEQ ID NO: 2 - DNA, 21 bp, Artificial Sequence
  Synthesised sequence
  misc_feature: Reverse primer for EVI1
gttctctgatcaggcagttgg

SEQ ID NO: 3 - DNA, 20 bp, Artificial Sequence
  Synthesised sequence
  misc_feature: EVI1 fluorescent probe
tacttgaggccttctccagg

SEQ ID NO: 4 - DNA, 5533 bp, Homo sapiens
  misc_feature: Homo sapiens MDS1 and EVI1 complex locus (MECOM), transcript variant 4, mRNA, NCBI Reference Sequence : NM_004991.3
gattgccatctgacaagatctccaaatcaaagtgataaatcgctccaaactttttttggcggcgctgagatgttggaggggcgtctagcgcgcatgtgcgaaggtgtccaaactgacaatgctggagagatagcgagtgtggattgagagaaagggagagagggagggagagagagtgaaagaagaaaatacagagagtgagtgtgtggaagagagagagaaacaggagagaaacaggagggagggagagagagagagagagagagagagagagagagagagagagagagagagagagagacaggagagagagggagggagcgagagggagagcaaaagaaggaaaggatccaagaaaaaaaagccccaaccacacaccagcggctgcaggactgggcacagcatgagatccaaaggcagggcaaggaaactggccacaaataatgagtgtgtatatggcaactaccctgaaatacctttggaagaaatgccagatgcagatggagtagccagcactccctccctcaatattcaagagccatgctctcctgccacatccagtgaagcattcactccaaaggagggttctccttacaaagcccccatctacatccctgatgatatccccattcctgctgagtttgaacttcgagagtcaaatatgcctggggcaggactaggaatatggaccaaaaggaagatcgaagtaggtgaaaagtttgggccttatgtgggagagcagaggtcaaacctgaaagaccccagttatggatgggagatcttagacgaattttacaatgtgaagttctgcatagatgccagtcaaccagatgttggaagctggctcaagtacattagattcgctggctgttatgatcagcacaaccttgttgcatgccagataaatgatcagatattctatagagtagttgcagacattgcgccgggagaggagcttctgctgttcatgaagagcgaagactatccccatgaaactatggcgccggatatccacgaagaacggcaatatcgctgcgaagactgtgaccagctctttgaatctaaggctgaactagcagatcaccaaaagtttccatgcagtactcctcactcagcattttcaatggttgaagaggactttcagcaaaaactcgaaagcgagaatgatctccaagagatacacacgatccaggagtgtaaggaatgtgaccaagtttttcctgatttgcaaagcctggagaaacacatgctgtcacatactgaagagagggaatacaagtgtgatcagtgtcccaaggcatttaactggaagtccaatttaattcgccaccagatgtcacatgacagtggaaagcactatgaatgtgaaaactgtgccaaggttttcacggaccctagcaaccttcagcggcacattcgctctcagcatgtcggtgcccgggcccatgcatgcccggagtgtggcaaaacgtttgccacttcgtcgggcctcaaacaacacaagcacatccacagcagtgtgaagccctttatctgtgaggtctgccataaatcctatactcagttttcaaacctttgccgtcataagcgcatgcatgctgattgcagaacccaaatcaagtgcaaagactgtggacaaatgttcagcactacgtcttccttaaataaacacaggaggttttgtgagggcaagaaccattttgcggcaggtggattttttggccaaggcatttcacttcctggaaccccagctatggataaaacgtccatggttaatatgagtcatgccaacccgggccttgctgactattttggcgccaataggcatcctgctggtcttacctttccaacagctcctggattttcttttagcttccctggtctgtttccttccggcttgtaccacaggcctcctttgatacctgctagttctcctgttaaaggactatcaagtactgaacagacaaacaaaagtcaaagtcccctcatgacacatcctcagatactgccagctacacaggatattttgaaggcactatctaaacacccatctgtaggggacaataagccagtggagctccagcccgagaggtcctctgaagagaggccctttgagaaaatcagtgaccagtcagagagtagtgaccttgatgatgtcagtacaccaagtggcagtgacctggaaacaacctcgggctctgatctggaaagtgacattgaaagtgataaagagaaatttaaagaaaatggtaaaatgttcaaagacaaagtaagccctcttcagaatctggcttcaataaataataagaaagaatacagcaatcattccattttctcaccatctttagaggagcagactgcggtgtcaggagctgtgaatgattctataaaggctattgcttctattgctgaaaaatactttggttcaacaggactggtggggctgcaagacaaaaaagttggagctttaccttacccttccatgtttcccctcccattttttccagcattctctcaatcaatgtacccatttcctgatagagacttgagatcgttacctttgaaaatggaaccccaatcaccaggtgaagtaaagaaactgcagaagggcagctctgagtccccctttgatctcaccactaagcgaaaggatgagaagcccttgactccagtcccctccaagcctccagtgacacctgccacaagccaagaccagcccctggatctaagtatgggcagtaggagtagagccagtgggacaaagctgactgagcctcgaaaaaaccacgtgtttgggggaaaaaaaggaagcaacgtcgaatcaagacctgcttcagatggttccttgcagcatgcaagacccactcctttctttatggaccctatttacagagtagagaaaagaaaactaactgacccacttgaagctttaaaagagaaatacttgaggccttctccaggattcttgtttcacccacaattccaactgcctgatcagagaacttggatgtcagctattgaaaacatggcagaaaagctagagagcttcagtgccctgaaacctgaggccagtgagctcttacagtcagtgccctctatgttcaacttcagggcgcctcccaatgccctgccagagaaccttctgcggaagggaaaggagcgctatacctgcagatactgtggcaagatttttccaaggtctgcaaacctaacacggcacttgagaacccacacaggagagcagccttacagatgcaaatactgtgacagatcatttagcatatcttctaacttgcaaaggcatgttcgcaacatccacaataaagagaagccatttaagtgtcacttatgtgataggtgttttggtcaacaaaccaatttagacagacacctaaagaaacatgagaatgggaacatgtccggtacagcaacatcgtcgcctcattctgaactggaaagtacaggtgcgattctggatgacaaagaagatgcttacttcacagaaattcgaaatttcattgggaacagcaaccatggcagccaatctcccaggaatgtggaggagagaatgaatggcagtcattttaaagatgaaaaggctttggtgaccagtcaaaattcagacttgctggatgatgaagaagttgaagatgaggtgttgttagatgaggaggatgaagacaatgatattactggaaaaacaggaaaggaaccagtgacaagtaatttacatgaaggaaaccctgaggatgactatgaagaaaccagtgccctggagatgagttgcaagacatccccagtgaggtataaagaggaagaatataaaagtggactttctgctctagatcatataaggcacttcacagatagcctcaaaatgaggaaaatggaagataatcaatattctgaagctgagctgtcttcttttagtacttcccatgtgccagaggaacttaagcagccgttacacagaaagtccaaatcgcaggcatatgctatgatgctgtcactgtctgacaaggagtccctccattctacatcccacagttcttccaacgtgtggcacagtatggccagggctgcggcggaatccagtgctatccagtccataagccacgtatgacgttatcaaggttgaccagagtgggaccaagtccaacagtagcatggctctttcatataggactatttacaagactgctgagcagaatgccttataaacctgcagggtcactcatctaaagtctagtgaccttaaactgaatgatttaaaaaagaaaagaaagaaaaaagaaactatttattctcgatattttgttttgcacagcaaaggcagctgctgacttctggaagatcaatcaatgcgacttaaagtgattcagtgaaaacaaaaaacttggtgggctgaaggcatcttccagtttaccccaccttagggtatgggtgggtgagaagggcagttgagatggcagcattgatatgaatgaacactccatagaaactgaattctcttttgtacaagatcacctgacatgattgggaacagttgcttttaattacagatttaatttttttcttcgttaaagttttatgtaatttaaccctttgaagacagaagtagttggatgaaatgcacagtcaattattatagaaactgataacagggagtacttgttcccccttttgccttcttaagtacattgtttaaaactagggaaaaagggtatgtgtatattgtaaactatggatgttaacactcaaagaggttaagtcagtgaagtaacctattcatcaccagtaccgctgtaccactaataaattgtttgccaaatccttgtaataacatcttaattttagacaatcatgtcactgtttttaatgtttatttttttgtgtgtgttgcgtgtatcatgtatttatttgttggcaaactattgtttgttgattaaaatagcactgttccagtcagccactactttatgacgtctgaggcacacccctttccgaatttcaaggaccaaggtgacccgacctgtgtatgagagtgccaaatggtgtttggcttttcttaacattcctttttgtttgtttgttttgttttccttcttaatgaactaaatacgaatagatgcaacttagtttttgtaatactgaaatcgattcaattgtataaacgattataatttctttcatggaagcatgattcttctgattaaaaactgtactccatattttatgctggttgtctgcaagcttgtgcgatgttatgttcatgttaatcctatttgtaaaatgaagtgttcccaaccttatgttaaaagagagaagtaaataacagactgtattcagttattttgccctttattgaggaaccagatttgttttctttttgtttgtaatctcattttgaaataatcagcaagttgaggtactttcttcaaatgctttgtacaatataaactgttatgcctttcagtgcattactatgggaggagcaactaaaaaataaagacttacaaaaaggagtattttt

SEQ ID NO: 5 - DNA, 5195 bp, Homo sapiens
  misc_feature: Homo sapiens MDS1 and EVI1 complex locus (MECOM), transcript variant 7, mRNA, NCBI Reference Sequence : NM_001205194.1
gattgccatctgacaagatctccaaatcaaagtgataaatcgctccaaactttttttggcggcgctgagatgttggaggggcgtctagcgcgcatgtgcgaaggtgtccaaactgacaatgctggagagatagcgagtgtggattgagagaaagggagagagggagggagagagagtgaaagaagaaaatacagagagtgagtgtgtggaagagagagagaaacaggagagaaacaggagggagggagagagagagagagagagagagagagagagagagagagagagagagagagagagacaggagagagagggagggagcgagagggagagcaaaagaaggaaaggatccaagaaaaaaaagccccaaccacacaccagcggctgcaggactgggcacagcatgagatccaaaggcagggcaaggaaactggccacaaatcttagacgaattttacaatgtgaagttctgcatagatgccagtcaaccagatgttggaagctggctcaagtacattagattcgctggctgttatgatcagcacaaccttgttgcatgccagataaatgatcagatattctatagagtagttgcagacattgcgccgggagaggagcttctgctgttcatgaagagcgaagactatccccatgaaactatggcgccggatatccacgaagaacggcaatatcgctgcgaagactgtgaccagctctttgaatctaaggctgaactagcagatcaccaaaagtttccatgcagtactcctcactcagcattttcaatggttgaagaggactttcagcaaaaactcgaaagcgagaatgatctccaagagatacacacgatccaggagtgtaaggaatgtgaccaagtttttcctgatttgcaaagcctggagaaacacatgctgtcacatactgaagagagggaatacaagtgtgatcagtgtcccaaggcatttaactggaagtccaatttaattcgccaccagatgtcacatgacagtggaaagcactatgaatgtgaaaactgtgccaaggttttcacggaccctagcaaccttcagcggcacattcgctctcagcatgtcggtgcccgggcccatgcatgcccggagtgtggcaaaacgtttgccacttcgtcgggcctcaaacaacacaagcacatccacagcagtgtgaagccctttatctgtgaggtctgccataaatcctatactcagttttcaaacctttgccgtcataagcgcatgcatgctgattgcagaacccaaatcaagtgcaaagactgtggacaaatgttcagcactacgtcttccttaaataaacacaggaggttttgtgagggcaagaaccattttgcggcaggtggattttttggccaaggcatttcacttcctggaaccccagctatggataaaacgtccatggttaatatgagtcatgccaacccgggccttgctgactattttggcgccaataggcatcctgctggtcttacctttccaacagctcctggattttcttttagcttccctggtctgtttccttccggcttgtaccacaggcctcctttgatacctgctagttctcctgttaaaggactatcaagtactgaacagacaaacaaaagtcaaagtcccctcatgacacatcctcagatactgccagctacacaggatattttgaaggcactatctaaacacccatctgtaggggacaataagccagtggagctccagcccgagaggtcctctgaagagaggccctttgagaaaatcagtgaccagtcagagagtagtgaccttgatgatgtcagtacaccaagtggcagtgacctggaaacaacctcgggctctgatctggaaagtgacattgaaagtgataaagagaaatttaaagaaaatggtaaaatgttcaaagacaaagtaagccctcttcagaatctggcttcaataaataataagaaagaatacagcaatcattccattttctcaccatctttagaggagcagactgcggtgtcaggagctgtgaatgattctataaaggctattgcttctattgctgaaaaatactttggttcaacaggactggtggggctgcaagacaaaaaagttggagctttaccttacccttccatgtttcccctcccattttttccagcattctctcaatcaatgtacccatttcctgatagagacttgagatcgttacctttgaaaatggaaccccaatcaccaggtgaagtaaagaaactgcagaagggcagctctgagtccccctttgatctcaccactaagcgaaaggatgagaagcccttgactccagtcccctccaagcctccagtgacacctgccacaagccaagaccagcccctggatctaagtatgggcagtaggagtagagccagtgggacaaagctgactgagcctcgaaaaaaccacgtgtttgggggaaaaaaaggaagcaacgtcgaatcaagacctgcttcagatggttccttgcagcatgcaagacccactcctttctttatggaccctatttacagagtagagaaaagaaaactaactgacccacttgaagctttaaaagagaaatacttgaggccttctccaggattcttgtttcacccacaattccaactgcctgatcagagaacttggatgtcagctattgaaaacatggcagaaaagctagagagcttcagtgccctgaaacctgaggccagtgagctcttacagtcagtgccctctatgttcaacttcagggcgcctcccaatgccctgccagagaaccttctgcggaagggaaaggagcgctatacctgcagatactgtggcaagatttttccaaggtctgcaaacctaacacggcacttgagaacccacacaggagagcagccttacagatgcaaatactgtgacagatcatttagcatatcttctaacttgcaaaggcatgttcgcaacatccacaataaagagaagccatttaagtgtcacttatgtgataggtgttttggtcaacaaaccaatttagacagacacctaaagaaacatgagaatgggaacatgtccggtacagcaacatcgtcgcctcattctgaactggaaagtacaggtgcgattctggatgacaaagaagatgcttacttcacagaaattcgaaatttcattgggaacagcaaccatggcagccaatctcccaggaatgtggaggagagaatgaatggcagtcattttaaagatgaaaaggctttggtgaccagtcaaaattcagacttgctggatgatgaagaagttgaagatgaggtgttgttagatgaggaggatgaagacaatgatattactggaaaaacaggaaaggaaccagtgacaagtaatttacatgaaggaaaccctgaggatgactatgaagaaaccagtgccctggagatgagttgcaagacatccccagtgaggtataaagaggaagaatataaaagtggactttctgctctagatcatataaggcacttcacagatagcctcaaaatgaggaaaatggaagataatcaatattctgaagctgagctgtcttcttttagtacttcccatgtgccagaggaacttaagcagccgttacacagaaagtccaaatcgcaggcatatgctatgatgctgtcactgtctgacaaggagtccctccattctacatcccacagttcttccaacgtgtggcacagtatggccagggctgcggcggaatccagtgctatccagtccataagccacgtatgacgttatcaaggttgaccagagtgggaccaagtccaacagtagcatggctctttcatataggactatttacaagactgctgagcagaatgccttataaacctgcagggtcactcatctaaagtctagtgaccttaaactgaatgatttaaaaaagaaaagaaagaaaaaagaaactatttattctcgatattttgttttgcacagcaaaggcagctgctgacttctggaagatcaatcaatgcgacttaaagtgattcagtgaaaacaaaaaacttggtgggctgaaggcatcttccagtttaccccaccttagggtatgggtgggtgagaagggcagttgagatggcagcattgatatgaatgaacactccatagaaactgaattctcttttgtacaagatcacctgacatgattgggaacagttgcttttaattacagatttaatttttttcttcgttaaagttttatgtaatttaaccctttgaagacagaagtagttggatgaaatgcacagtcaattattatagaaactgataacagggagtacttgttcccccttttgccttcttaagtacattgtttaaaactagggaaaaagggtatgtgtatattgtaaactatggatgttaacactcaaagaggttaagtcagtgaagtaacctattcatcaccagtaccgctgtaccactaataaattgtttgccaaatccttgtaataacatcttaattttagacaatcatgtcactgtttttaatgtttatttttttgtgtgtgttgcgtgtatcatgtatttatttgttggcaaactattgtttgttgattaaaatagcactgttccagtcagccactactttatgacgtctgaggcacacccctttccgaatttcaaggaccaaggtgacccgacctgtgtatgagagtgccaaatggtgtttggcttttcttaacattcctttttgtttgtttgttttgttttccttcttaatgaactaaatacgaatagatgcaacttagtttttgtaatactgaaatcgattcaattgtataaacgattataatttctttcatggaagcatgattcttctgattaaaaactgtactccatattttatgctggttgtctgcaagcttgtgcgatgttatgttcatgttaatcctatttgtaaaatgaagtgttcccaaccttatgttaaaagagagaagtaaataacagactgtattcagttattttgccctttattgaggaaccagatttgttttctttttgtttgtaatctcattttgaaataatcagcaagttgaggtactttcttcaaatgctttgtacaatataaactgttatgcctttcagtgcattactatgggaggagcaactaaaaaataaagacttacaaaaaggagtattttt

SEQ ID NO: 6 - DNA, 4835 bp, Homo sapiens
  misc_feature: Homo sapiens MDS1 and EVI1 complex locus (MECOM), transcript variant 2, mRNA, NCBI Reference Sequence : NM_005241.3
ccttgccaagtaacagctttgctgtccaacatcgtgtgctgcttcgcgagaaagtcacattcggaccctttggctagattatcttagacgaattttacaatgtgaagttctgcatagatgccagtcaaccagatgttggaagctggctcaagtacattagattcgctggctgttatgatcagcacaaccttgttgcatgccagataaatgatcagatattctatagagtagttgcagacattgcgccgggagaggagcttctgctgttcatgaagagcgaagactatccccatgaaactatggcgccggatatccacgaagaacggcaatatcgctgcgaagactgtgaccagctctttgaatctaaggctgaactagcagatcaccaaaagtttccatgcagtactcctcactcagcattttcaatggttgaagaggactttcagcaaaaactcgaaagcgagaatgatctccaagagatacacacgatccaggagtgtaaggaatgtgaccaagtttttcctgatttgcaaagcctggagaaacacatgctgtcacatactgaagagagggaatacaagtgtgatcagtgtcccaaggcatttaactggaagtccaatttaattcgccaccagatgtcacatgacagtggaaagcactatgaatgtgaaaactgtgccaaggttttcacggaccctagcaaccttcagcggcacattcgctctcagcatgtcggtgcccgggcccatgcatgcccggagtgtggcaaaacgtttgccacttcgtcgggcctcaaacaacacaagcacatccacagcagtgtgaagccctttatctgtgaggtctgccataaatcctatactcagttttcaaacctttgccgtcataagcgcatgcatgctgattgcagaacccaaatcaagtgcaaagactgtggacaaatgttcagcactacgtcttccttaaataaacacaggaggttttgtgagggcaagaaccattttgcggcaggtggattttttggccaaggcatttcacttcctggaaccccagctatggataaaacgtccatggttaatatgagtcatgccaacccgggccttgctgactattttggcgccaataggcatcctgctggtcttacctttccaacagctcctggattttcttttagcttccctggtctgtttccttccggcttgtaccacaggcctcctttgatacctgctagttctcctgttaaaggactatcaagtactgaacagacaaacaaaagtcaaagtcccctcatgacacatcctcagatactgccagctacacaggatattttgaaggcactatctaaacacccatctgtaggggacaataagccagtggagctccagcccgagaggtcctctgaagagaggccctttgagaaaatcagtgaccagtcagagagtagtgaccttgatgatgtcagtacaccaagtggcagtgacctggaaacaacctcgggctctgatctggaaagtgacattgaaagtgataaagagaaatttaaagaaaatggtaaaatgttcaaagacaaagtaagccctcttcagaatctggcttcaataaataataagaaagaatacagcaatcattccattttctcaccatctttagaggagcagactgcggtgtcaggagctgtgaatgattctataaaggctattgcttctattgctgaaaaatactttggttcaacaggactggtggggctgcaagacaaaaaagttggagctttaccttacccttccatgtttcccctcccattttttccagcattctctcaatcaatgtacccatttcctgatagagacttgagatcgttacctttgaaaatggaaccccaatcaccaggtgaagtaaagaaactgcagaagggcagctctgagtccccctttgatctcaccactaagcgaaaggatgagaagcccttgactccagtcccctccaagcctccagtgacacctgccacaagccaagaccagcccctggatctaagtatgggcagtaggagtagagccagtgggacaaagctgactgagcctcgaaaaaaccacgtgtttgggggaaaaaaaggaagcaacgtcgaatcaagacctgcttcagatggttccttgcagcatgcaagacccactcctttctttatggaccctatttacagagtagagaaaagaaaactaactgacccacttgaagctttaaaagagaaatacttgaggccttctccaggattcttgtttcacccacaattccaactgcctgatcagagaacttggatgtcagctattgaaaacatggcagaaaagctagagagcttcagtgccctgaaacctgaggccagtgagctcttacagtcagtgccctctatgttcaacttcagggcgcctcccaatgccctgccagagaaccttctgcggaagggaaaggagcgctatacctgcagatactgtggcaagatttttccaaggtctgcaaacctaacacggcacttgagaacccacacaggagagcagccttacagatgcaaatactgtgacagatcatttagcatatcttctaacttgcaaaggcatgttcgcaacatccacaataaagagaagccatttaagtgtcacttatgtgataggtgttttggtcaacaaaccaatttagacagacacctaaagaaacatgagaatgggaacatgtccggtacagcaacatcgtcgcctcattctgaactggaaagtacaggtgcgattctggatgacaaagaagatgcttacttcacagaaattcgaaatttcattgggaacagcaaccatggcagccaatctcccaggaatgtggaggagagaatgaatggcagtcattttaaagatgaaaaggctttggtgaccagtcaaaattcagacttgctggatgatgaagaagttgaagatgaggtgttgttagatgaggaggatgaagacaatgatattactggaaaaacaggaaaggaaccagtgacaagtaatttacatgaaggaaaccctgaggatgactatgaagaaaccagtgccctggagatgagttgcaagacatccccagtgaggtataaagaggaagaatataaaagtggactttctgctctagatcatataaggcacttcacagatagcctcaaaatgaggaaaatggaagataatcaatattctgaagctgagctgtcttcttttagtacttcccatgtgccagaggaacttaagcagccgttacacagaaagtccaaatcgcaggcatatgctatgatgctgtcactgtctgacaaggagtccctccattctacatcccacagttcttccaacgtgtggcacagtatggccagggctgcggcggaatccagtgctatccagtccataagccacgtatgacgttatcaaggttgaccagagtgggaccaagtccaacagtagcatggctctttcatataggactatttacaagactgctgagcagaatgccttataaacctgcagggtcactcatctaaagtctagtgaccttaaactgaatgatttaaaaaagaaaagaaagaaaaaagaaactatttattctcgatattttgttttgcacagcaaaggcagctgctgacttctggaagatcaatcaatgcgacttaaagtgattcagtgaaaacaaaaaacttggtgggctgaaggcatcttccagtttaccccaccttagggtatgggtgggtgagaagggcagttgagatggcagcattgatatgaatgaacactccatagaaactgaattctcttttgtacaagatcacctgacatgattgggaacagttgcttttaattacagatttaatttttttcttcgttaaagttttatgtaatttaaccctttgaagacagaagtagttggatgaaatgcacagtcaattattatagaaactgataacagggagtacttgttcccccttttgccttcttaagtacattgtttaaaactagggaaaaagggtatgtgtatattgtaaactatggatgttaacactcaaagaggttaagtcagtgaagtaacctattcatcaccagtaccgctgtaccactaataaattgtttgccaaatccttgtaataacatcttaattttagacaatcatgtcactgtttttaatgtttatttttttgtgtgtgttgcgtgtatcatgtatttatttgttggcaaactattgtttgttgattaaaatagcactgttccagtcagccactactttatgacgtctgaggcacacccctttccgaatttcaaggaccaaggtgacccgacctgtgtatgagagtgccaaatggtgtttggcttttcttaacattcctttttgtttgtttgttttgttttccttcttaatgaactaaatacgaatagatgcaacttagtttttgtaatactgaaatcgattcaattgtataaacgattataatttctttcatggaagcatgattcttctgattaaaaactgtactccatattttatgctggttgtctgcaagcttgtgcgatgttatgttcatgttaatcctatttgtaaaatgaagtgttcccaaccttatgttaaaagagagaagtaaataacagactgtattcagttattttgccctttattgaggaaccagatttgttttctttttgtttgtaatctcattttgaaataatcagcaagttgaggtactttcttcaaatgctttgtacaatataaactgttatgcctttcagtgcattactatgggaggagcaactaaaaaataaagacttacaaaaaggagtattttt

SEQ ID NO: 7 - DNA, 24 bp, Artificial Sequence
  synthesised sequence
  misc_feature: beta actin forward primer
cagccatgtacgttgctatccagg

SEQ ID NO: 8 - DNA, 22 bp, Artificial Sequence
  Synthesised sequence
  misc_feature: beta-actin reverse primer
ggtccagacgcaggatggcatg

SEQ ID NO: 9 - DNA, 20 bp, Artificial Sequence
  synthesised sequence
  misc_feature: beta-actin fluorescent probe
actggcatcgtgatggactc

SEQ ID NO: 10 - DNA, 580277 bp, Homo sapiens
  misc_feature: gi|224589815:c169381563-168801287 Homo sapiens chromosome 3, GRCh37.p10 Primary Assembly
gattgccatctgacaagatctccaaatcaaagtgataaatcgctccaaactttttttggcggcgctgagatgttggaggggcgtctagcgcgcatgtgcgaaggtgtccaaactgacaatgctggagagatagcgagtgtggattgagagaaagggagagagggagggagagagagtgaaagaagaaaatacagagagtgagtgtgtggaagagagagagaaacaggagagaaacaggagggagggagagagagagagagagagagagagagagagagagagagagagagagagagagagacaggagagagagggagggagcgagagggagagcaaaagaaggaaaggatccaagaaaaaaaagccccaaccacacaccagcggctgcaggactgggcacagcatgagatccaaaggcagggcaaggaaactggccacaagtaggtgcaatatcccttttctattggcttttccccctcctctgccatcttgcatatctgtctctagcgctccgggagggagcgcgggctgcctcttgcgccggggccccgggtggagggcaggcggagcgcagccccagcaacctgccggttccagtctctgctcccggtcgcccgcgctctcgctcccgggttgggcgccggaggagcctgggcagccctcagtcccgcgcaccgaccagctgtggcaaccccggggtgggggtgggggtgggggcagcaaagactaggggtgggagggaggagagagcgcgagagtgagcgcgaaggggtggggtgggggggaagagaagaggagaaagtctccccctcccctccccttccccccaggcgggggagagttgcctctggccaaccagctagtcccgggtgtgggaggaggggggcgcgggggatggggggccggcaggagaagggagccttttcgagcctcggtttgtttctggggtttgggtagggtaggcggctcagagggagccacagtggcggcggcggcgggcggctgtggtggacttgggaaaagttgcgaggcggccgctggaagttgcgcgggcgggcgggtggactgcgccgagccgcggctgcggtagtgggcgctgtgcgctcggccatgctctccggcgcggcgctgcgcggcgggaggactgcggcggggagtaggggacaccaaggtgggggctgtgatcgcggggtgggggcgggggcacgggcagagcagagctaccggctccgcacagccacgcgcaggtggggaggaaagaggcccagcgagcgctcggacgtggggagagaagaggcccagcgagcgctcggagagccgggagtggagggcacacagccagcggcggcagcctaggagcaggaggcagagagggcgcgctgcgacccgcgcacctcgggcttgctgggcgccgagcaaaccccagggggcgggctgccagagcgttgggccgcggagagggcgcagcgcagcctccggcgcttcgtctgggtgcagcctgggtccagggtcaataaccctccccggcgccccctgcctgcccggcgcggagcggccttggtctggcgggatgtgggctaaggggtttggggagggggcggtgggagtcccatcccccactcttacagcaaaagtgttggatgactcgcctggctttgccggcggggcccacactttcccacacggtgtgatgctccgccaggactgtagacgacaggactgcgtttgtccaaatgcttctacttcgagttgaaggggactcagggacactgagccccggagcggctgggagcgctcttccttgaggtgtcaataggcggggctggagctgcctcgggagtggacaggccgcggttctctctcccacactcgcactcgccgaaaacaaaactctctaattgtgttgtttacggaacgcagaaatgagagatcggagatgggtgggatgcttctccccagtgaaatcccagtctccccccgcgcgaccctcgcacattagaaccaaatacggtaggtatcgtatccacgcctccttgctcactgcgtccctgcagcagcccgggaagtcggcggcacctcagcaggctcggcttcgcgggcattggagtcggcggtgtagccccgcgagatgctgtcatcccaggcgcctttccagtgctttgtgcagtcctcacccaagcactcgtacactccccgatacatttcctttcccctgggtctgagaaatcaacctaaatatagggctctttgggtcatcagtccatctgtttctcttttgggtgttgttctttacactcgctgctacagtgtcaaagggcgccggtggaactgttttccctgtttgcttttaaatgaggccgatgtctttattttcatctgaagggaaataaatgtacatatacttgaggtttgcgggcttcgatttggactaaaggttgggagagagagagagtgtgtgtgtgggggggggagttggcgggagtgggatggtgggtgggggtgggtagcccttttcaaccatgcctaagttgtgaagtgaaagcttaaggcttcgcgccgcaactcactgcccgataacttctgaagtgaaagcagaacacaaaacccttcgaattttcttgagcaactttttcaactattttaattgccaagcaagacatacgatgccgtcttaaaatattcccgcacgcacagtccactcagcatccagaaactgagcctcgtttccgatctgatgatacttgtcattcaactggtgggagacccatttattttgtccccagggtctctaaggatgccgctgccgctttctgatagctagatctcaactcttacaaacttttactgagcctcagattcccgcttgcactactccagctgttgctgccgcagctgcctttcccagacagaagcgctgcgttgcaattcttcagttacaatctgggtaataaaggaaatcatattaaaactacagatttttgtattttaaagcgcgatttccttcccccgagtagcgcgtggcggagatggttggtgacccctgcggtgcaatcatccaacgaaaacttcactgctctgcaccagtttttctttttctgggtttagaaggggagttgtgactacaatactttaaaaaacaaaactacctttattgtggcaagagaaaacattacaatggaaacaaattacatataaatagttgttttctcggtagcttgttgttctttttgtcttttgtaaatttctttggtggtcttaagtcctgatttggccttgactacagtacaggagcccatggacctagaccagagaccacggaccctgaaaatacccactgaatctacaccgagattgaatgcacaacacagtttgcaacttgtaaggcttgtattttatacagtagttgaaaccgataaattcgttgtaaatcatttgggaaggttaaaaaatttaattaaaaataaaatgaaaggcaggaagattgacatttgtagtgcctaacgcccctgaattttatttccatctttaagaaaagaaaaccaaaagccaaaccgactctggcagcgcggggagacttcccagccgttttcttgggcagctaggacagcacctgggccgtgccagaaatgccagttgctatggtcctgatggatggaaaggaagtgcaggttgggtctgcgcagcatgtctaaagcctgaaataccgaagccacccttaccttacttccccaaagtgacaacgcgcgggaattcagtcacagcagagaacgagttgcatccagtaactcccttagctaccggccccccagaagtctcgtaaagtctcaaaaggcgatgcgattagcaagaccgcggcaaggggggcacttgttactcctacacttgctctctgtttaaaaaaaggctctgaagtaggaaaggtagatgccgaccctttctcccgtccttaaactactcaccttgtcagcccagtaactgagataaacacaacaaaacaacccccccacaacaacaaacacaacacccagattcaggcatttactctctgtatgcccacctacttgggttttccttcatccttaagaaactcagatgaaaacagagctttgttttaaaaaatacttttatttgtttatttcagattgcttctgaggaggaaaatccttctcccaacggaggccgaggccccttctaggaaggcggtttatttgctattacttgaccattacccgggcttagggcttctttattgcatttggcacttggagcacagtcttcttgcagtattttgatgtgttttgcaaaaaaaaaaaaaaaaaaaaaaaaaaaaaaaaatctgtgtttaggggaaggttaattacgcttttcattcttccctcatctccagcactgtggaagggaacggttcattagctgtagaggcagaaaggctaaaaagcaaggcttctttttttatttgtagggactgcagagttgcaggtcttggctatagagtgcatgtgagtgtgtgtgtgaatgtgagtgagtgtgacttttgccggctagcccagctcccaggctttctgagccaaggcctcccctgggccctggggccggcttcctgcagggacagacattcaacatgtaggactagaaattaacatgtcattccacgaattttggtttctttctttctttctctttctttttttttttttttttttggagttgaaggtgaggagtcgtaagcaatttctctttaagcatgttactgtttgggagtttattttatttttgtaagttggggccaggttatccgaggctgcagttgtgacctggggcaggaaggggggacgccctcctccccgggctagaaggacaagagagcggagttgcccccggcacgcccggctcggccccctctctcccggcacccccctgcgcgttgcctccgctggaagcgggcggtgagatggagaaccttgacttgtcatctcctggtcaccggctttttccctgttcccaaggcacccagagccctgttcccaagagctgagccctcccacgcttcatctcaaaaccgtctggtgctgaggaagtggcccaagatggacgtgggggtgggactggggaagccccagtgaggtgggaggcagtttctcactcagggggccccctacacctcgctcctcaggctgctcagctcagggctccaaggtttggccagaactcttctttccctctctagtctcagaggggctgcgtgcctggcgcgctgcttccctcggagctgggtttacattgacagtgtaaactcacacccacacatgcgtgtgcacacccacacacgtcttggcttcaggaagacaaggagcactcttgcgcggagggcaggcacacactcactcattcactctccctgttgggacaggctccttcctagcctcatagggcaagggagagtgagtttggggaagagatggggtgggagggaaaagttacactctgatgatgccaggtacatttttttggagtgacggttaacccttcttccgctggaagccgctgtctaggcattttctaaaacggtctgtggggtctgcttttcttttctcctggacggcgcaggataaatcattagttccctcccgacttccccactccactagccacggtcttctttctaaaattagatttcccccttcccactcttctggccttcagagtttaccagggaattttcaaggaaattggctgtatagtgagaacaagtgtaaggaagaggataaagaggagacagacaaatcgatcagaaaaccagagagggagacaggaagggagaaatagtgtagttcttccagatccttagtttgcacacagattggtattatcctccccagcccctccaggaaatgaaaaaagtataatccttgttaattacctttgcttactacaagccatacaagaaacttcagagatgtctctacatagggaagaaactgtttacaagactctttcaaaagtgtgacatattgctctagttcagcactaaaaagctaaacacacttagcctcctttgaagtgccctggctggggcagcttatttgagtgtggttcagatattgctgtgggtataactaatggcttctacctatttagctcaagtgggaggagagaaagtcctgaattccttgtccaatgggtccctctggagactgggttctggcttcttgccaattctgtacaatgtcaacattgaatatttgaattcccagactctatttaacaagtttctaaataaataaactcattgtgtgtctgtgtttaaaattatttcacctctttcataaaagctacagcatcttattacattggccttgcaagttgattttaaaaaaataaacaaacagatctcaaggcattttaatagccagatctccacaatttgtatgtattgtgaagccattctctcacgtgtggctgtgtaggggttacctagagggatcgtgatagcgaattttaataaaaaccccaactaagttcagaaagtaagtgaaatattaactgcgtctaaagggagccttgactgtgtaactttagtgtatttagatatttgttaattttgtctactgggtctacaggggacagagagcctcactgatgtgttctaaatggttgtctgaatacagatcccccttccctattggtatcagtaggtctagaactctgcccagatggttttgtttctaggcattttttatctgtgtatgtccttgtaagttggaaggagtaaatatatagatattatcttcatatttcactttggtgaaaaaaccacaagtcctatggttttactaattattcagcatttaaacatccatacagcatttttatctatatagaaacatagttgttctaagaagtacatactgaattttttttaaggcaagttctagtccttttgaaagtgtggaccacatctggagttgttaggaaagaaagtggaatttactctaatttatgtgtataaaatacaatgttattagaaagaatgggatttgaaagggcacacggtaaagcccataacatttagtgggtaatgtggagaactcaaagccaagacaaaaataccatcaacccatgcaaaccctaaaatagattacaatgacctcagtcattttcattttcaaaaataatagccatgattaaaatgggggagtgttttgcttggaaccatactcttcggcattattataaaagctgttttgtggttaaagaactgtttcattatggaaaaaaagggaactgaatttttaatcaaattcctgactcttcaaaagcactcattcttgaattaattcttattttgattttagttattattcttattcattagcaaacgtgcttttggcttgtatattcagccaaattcttgactactgacttttataacaattctaaaggagaaatttatttagaaaagagattttattatgttagtaaacatgtgtgtaggggtcattaactacacaacataaagaaccaacatttcctaaaccttgttcaagaacctgcctaaatgaattagttgtatatgtcaaggttgttcaaatgatgacatttatgaatgaaagtgcttgtacatggcagtttttgtgctttggcgatgggcaggcttacacaacaaatatcaatgtgctaggccctgtgcacgggcaaaccatgttccctactctcacaagcattacaaacgtgcacatcagtgtttgaatctgggcatgatccctgattgaaaagtcaggtcctcttcaagttattgaatgcctctgaggcctagcatctttacttgtgaagtgggagtaataatactaccctccttgggctgctgtgagagttaattggtataatgtgtgcaaagtacctaaggcacatgctcaataaatcttagtgggtttcagtttccttataatttatcagttaaattttctgaagaagaaacatccttttttttcccctcctgtttaatgtttttatccagtttcctttttaaaagtatttacatgtctacggtaagcattttgtatgtcttctcaataaattatgccctcagaatgaagggaagtcatatctaaaatttgggcacattaaaactgtccataccaagccaaactaggcagtaaatttgttctgaaaacttgagcatcttcctttgccctttatttggagtcggggtgagggggatgtgtaaataaaatgattgagatttcaacttttccccacagattttggcattgtatagccacacagccctaatttagttttgcatactctctagttatcattaggcaataatccctcctgaatgaaaatttgacttttagtggattgagtttgtaagtcactttactactgcagctgggttgctcctctttaaatgaatggattagactagagcagagcctgtaaatttgcaggtaccataaatgagtgaagcaaggtgggtataagccttaagctctctcctatttttatttaattttttgacacccagcctttgtatttcagaacaagagggagtggcggggatggtgggaaactggcagttcaagactcctctaaaggtggcagcttcttctcagctcctgctcactgttaccatttgggcaagggggttcagggccgccaggtcttccactttttaagagaagccacaaatctgggtttttatgtaagttttctctactttatgaaatgttgattcaattttaaaaaattctgcaggcccaaccaaacacctctgcctgcaatatatagtttgtagggtttgcaatgtccagattcattgatttccaagggtgcttcaaagtttcattttatggtgatatccagaatggtttttgaatattaccttgtgtttttaagatctatatcttcttccccacctcaagttaatatgtgtgtgtgtgtgtgtgtgtgtgtgtgttttgataggtggaagtacttattacagaatctgatatctggccatttatctggaaaaatagtcttttacaactatgttgtgtctttctttccctccatgccgtttcatcattaattggcttaagaaaataaactgaagcattccctccccttcttgtatccactggccaccattctttcttatttctcactaaacccaattctttgatttgtgggctgggggttgggcagtaaatcattaggagacagtcatctgtggttttccacagtgggagaaggagtcatttggctactgtggatattcagaggaagagttcacccctgccctcctaggagagtccagatgtaatgtcctgtacatctgtaactgaggaacccaactgatttttaagacctgaacctaggatggagaaataagtttttaagggatgaacgtcttatttgagcagagtggctttccatgtaggaaggtcatatatgttcgggtaacatgtgaaaataaacatactttgctctgtttattatcatgagttgtatttctagcagaagtgttaggtgaataacaggtaaaattaagtctttaggattaaaaattgtggtgatggaatgtcaacacaatggactctcctgataaagatttgactgagcactttataatatctaactcaatactgtagtcatgggacttgtcagtgaatacatatcactatcagtgaatattgttgggaatatcatcggataatgcaattcttttagaggaagattctgagtagtgatgaaccatgcatataagcattatcaatgagttatcacctcattctcaatctttatacctgatgctgaatctcaaattccttagcttggctgttgaggggctctacttttgtgccagaagaatgtggtgactcctgagtacaggtcgggagtgagatttgcctgggtttgaatcctggctccaccatttactagctggttgaaatgaaggcaagccatgtaacctttttgtgcctcagtttccttacttgtggactagaggtacttacctcatgtgaggatttgatcaaactaatgcatttagagtgccttaaatagaataagagttcaatacattattttattgacttttcaggcttgtcttattcaagactggtccattcagcctaccttgtttactcattctgtacctctcagtctcttatcagcctactcttgtgtttctaccatccaaattttggccataatgttgccatagtttgtaaatctacccatactgtacactgactgtcaaaatctaactcctctaagatttcatttgaactcctgcttcttcatgatctctcctggagatatgacttctatgttatttcattccaatagtatggaattgtctttatcatcattttggcattttattataaattgcttgtcttcatggtatatatcttatttttctaggtaaactgtaaaactcctggagagcccatttctgttttgtatagggcctaatactatgctttgcatatggcagatatcaatatgattaggtgatggtggttagcaatgggctttggtggattatgtgaaccccttcaatttctttggctgtaaaacctgtgcagttaagtaatgtcggcaccagaattctgggatatctgacatttcaagtgcatactaaatccacaattgacctattttgacagtgataaaccacctggaaagtggagtattattcctaattttcaccaataatgtccctcattttgccagtgcaggtattgcccatgacccctcacttaaatcacaaattgttattgatcttaaactctgtactagacctgattctggagaatgtcaaaggagtcaaggtagaaatggtaaaacattctgtggactcatgtaattcctagggatttgggaatattcagtttacaagtcatcagaagccaagtttttacctaaatcctaacaccaatgtaggcagttttgctgcctaatatttatgctctattaatatagagcatggtgtcaagcattttgctgtatatttaaatgcacttttatgattaaagatttctttcaaacaatttaaggttgatagataatgtattgaatcttgttttactgattaaattaacccaactcactcaactctgttcccttaattcaagtgcaaacatgacttcttcttctctgcccctccccactcctctaacccccatctgtcatttcacaaatcaaccatctctatagagaaaataggactgtctgtgtcttggacaactatcctcaagtcctgaatgattacaggcttttagtgcctgttaggagttttcttttaccgagaacagccatatatggtttcttgtgcacttaggactgctcctaagtcaatgggaactcctctaagtgagggtaagactaagacccacagcttttatgcttagcatagactttacctttggtgggaactatgaaattagtaataaaatgtttcatgataaaatgataataaaaacgaatggagggatggaatagctatcttagttttggctagggtcatagttcatgaccttcttttgggtcccagactcctgtgagaatctcatagaaagtatggagcttctttccagaaaatacacatgcaagaaacattttcatacaattttagcagctcatggatttctaaatttctaaatggttgaatgggggttcaaccattttttcagacttgattcaccttagcatgtttattataaaacatcttaaagtttttatcaatcttttttcattgtcttatacacaatatttttcttgttacaaaatttatacacaataatttttaaatgaaaagaatgtataaaataaaaatgaaagttattttctttcttttttgtcataaattgcctgcagatgaccaccattcatcctttagtgtagcttccagcagattttttcccccatgcatatattagcacatacatacatatagatttacaactttttacagcaaattgccttttcttttttttcttcttcgtaggttactggggtactagtgatatttggttacatgagtaaattttttagtggtgatttgtgagattttggtgcacccatcatctgagcagtatacaccgcaccatatttgtagtcttatccctcatcctctctccacccttccccccaagtccattgtatcattcttatgcctttgcatccccatagcttagctcccatatatcagcgagaacatcaatgtttggttttccattcctgagttacttcacttagaataatagtctccaatctcatccaggtcgctgcaaatgccgtaaccaaaaaagaaaactacagaccaatatcctgatgaacatagatgctaaaatccttaacaacatagtagctaaccaaattcaacaacttatcaaaaagataatccaccatgatcaagtgggtttcatatcacttgcagggatggtttaatatacacaagtcaataaatatgatacactacataaacagaattaaaaacaaaaatcacatgatcatctcaatagatgcagaaaaggcatttgacaaaatccagcatccctttaggattaaaactttcagcaaaattggcatttaagggacatacctcaatgtactaaaagcattattttattgtgacaaacccatggccaacataacactgagtggggaaaagttgaaagcattccgtctgcaaactggaacaagacaatgatgcccactctcaccactcctcttcaacacagtactggaagtcctagtcagagcaatcagacaagagaaagaaataaagggctttttctttttttaaacttaatataccttggatttttgtctgtatgtatcaatctaaaccattctttttaaaggcagaagatcctctattgtttagatctaacacatttcattgaaccaattccctgtggatgacatttgggtagtgtccagttttcagaacaaaacagacagagaagttccccaaaccaggacccaaaggaatatgaaagtaaagtctgcaattaaaggaagctcacagttcagggtgaagtgtgctggcctctgagacacggtcacagcagggttttgggaaggtcatagagggttgcttcactgtcagggcagatcagatttccaagcatctttggcttctggaggatcaagggtctaaaaccagagctaaggtatatctttctaaaatccactgtgatatatctgtgctatttcaagcttacaggattattccaggtcttatattatgccccatttctatttcttcctgctgcttggaacaggctgtagctgaaatcaatccatgtagcccaaactgggtaaggataagtaagttgtcagagtttcaggcctcaaggcttttttgttgttgttaagtgatttccttgtttgtgtgggacattattatcatactgccttatcctgtacatgtacctaaagccaactgatgctactagacccaccaaaacttttttgatgttctttaaaaaattacccacaataatttctagcttatgaattatgaagaccatttttatagaaaaatgtttttcactgggtaatcagactatgggaaaatttttataatggaaactatcttttacttttaactatagcataaaaaatatgacagtatagtgttacacactaaagcccatcagatgcaaaattccagtttttgattataagttataaaccaggatagagagacttctgaaaagtggttttctttggcaatgatgttgttgattaaatataaaaaattcagaaaaaattagttcagcccattcctttacacagaaggttacaaaaatggaataactgggttttggttctactggcaagaactattttgcttattaaaactcattggattatatcagattgcaaacatattggacattttagattggatttgaaaaggtaccattcaaggaattaaaattattcatataaatctttaagggattaatttactttgcaattttaattccttagagcacaatatttgtttcaaatgcgtacttttttggtgtggatgtttactggttgttccatgagggcattactctattaacatttttcaaagtatattttaagttagatcaatcaaattgaattaatgaatagttatcaagtacctagcatatgtaaggcatgatgaattaaatcctataaacactcaatttcctgaaaatattgaacaccgacatttgacagacatacatatacccctgaaaatgatttattaacagggacaaagatatccatgactacaaactggttttgtgagcttggaatactgaatcctaagcctgtctcttctccagatattttgttttcctattttttttttttttttttttgagatggagtttcgctcttgccgcccaggctggagtgcaatggcgtgatcttggctcactgcaacctccgcctcctgggttcaagcgattctcttgcctcagcctctggagtagctgagacagggtttcaccatggtgcccaggctggtctcgaacttgtgcgctcaaatgatctgcaagcctcagcctcccaaagtgctgggattacaggagtgagccactgtgtcagcctgatgttttcctggaaagtctgcctatcacatttgtctgttgttagggaaatgctgattgcaataactgagtaagatgtaggatgtatttacatagcccataaacactttatagaaatacaagccttgggtctgcagatgggcaaattactccttccatgctcacagtttttgcgtattttatcctttgtgcagttagagcaaactttcccatcacagttcaagaacaagttctctttaaaggatctcattcctccagcttcttgccacttacaagagcaccactgtctgagagcaaagatctgattaaaatgcccaaactgaagtctccatggtttccaaaggtgtgtctttctgctaggttcaatttttatccagtagaagatagtgctacccccaaattgacataaactcacagaagtggcttgtctttcaggctggcatgtgattttcttgttcatgaaacagaaataagaataaaaagcgctgccttctcttccaactgtctttgccaaccatcttgctgagctatgtgtatgcatccaagccaatgttccagccactaggcttggcacagaaatcagtgcattgaacatctttacttttgggcacagtctgaaattctaagcaaaattccccatttgcctaaatgcttaagatgcgagtgatttacgtattctgttgataatgatgcagtattaaaataccagcagagaccgtggtttgacccatgaagcagcattgtatcatatatatttttttgacctaaaaatactgggtagatggatcattagaggatgggaaatgtcaaggtaaagagcattatatgtctagggttttcaaagtgcctcatggtctgtatatcagatctctcttcctgccctcaagttatggtaatatcagtcaccaaggttttatcttcaagaagacaaaatactctgatacctaatacagcataatgagctccatcttagttaaccttccaagtgaatccttggcattggccaggacttgtagaatgtgacatttgtttccttctactgcttctggagtaatttacctaaccatgtcataacatgtcattatgaagcttgttaattactaataactttcctaagaggaaaatgctctctgtggtgttttgagccctccctgccttgaagatagggacttgttttttttcttaggcgtgatcatctcaaaacttcagtatattttgggtaccgtaaacatgttttctggcggataatgctggctgggacgtcaggatgtaggggtttgagtctcaagtttgctactcatcagtatggtatccttctgcagggcattaaccctctgagcctcagtgtcctcaagcgtaagagaggaacaataactacctctgtttggcttcttccagaccagcaatgctaacataagatgacatatgtataagcttttatcagctgcaaaaagctgtgtaaacttaacacacacagaatttcttattagaaactctagaaattatagaatattaaaaatgctaagagggtattaagaatgtagactctggaaccacattatttaggtttttcagttttaatcccttagagcacaatatttgttccagatgcatatttttttttggtgtggatgtttacaggttgttccatgagggcattactctagttaacatttttcaaagcatattttaaattagatggcttggttctatcactacctagctgtgtgggcattggccagctatttacttctctgtgcctgaatgtcatcatctgtaaaatggagataatttataacagcaacaataagtaataacgccagtcaaggttgttgagtgttcatgcgtcactgcagttaatcctcacatctctatgaggtggatgatattattgtcttagcttagagatgagcgctctggagacatgtttgttctttgctccaggcctctcagctttaagtacagagccaggatccaaaccttgatctgctttacaataaagtcgaagaacttaatctgaatgaatgctccactgccttatttttttaaatccagaaataaaagtagaacactacattgcctgggcattccaaagctcataaaacgtaataagattttggaaaaaagacactttaacttaaagaaatgatttcatacaactcttagtaaagaggaattttgctgcaatttaaaatgagaaagcttctttttatgacaggggctggtcatcccttcatctttcattttcttcctcaagttatctgcattgtgattttctattacgttatgattttagttttgtttagggagatccaaatgtcttggttgaatgaatgacttagggatacgtcattacttcattgcctgacatcacaagctaattataccttatcatttaccagtgaatagatggtgctagattcagattttcatttcctaaacaatgtattgtgacagtaaatatgcccaagctcaccagcatatttttagggcaaggaaagctagctacaactttctaattttttttttttgtacaatacttgagaccaagtctcgttcacttatcctcaattttgttttaatatccaaatgacttgggcctgcaacaaagtatttcactagctacttaattgaataacctgtagaatttagataaggaaagcctaatgagctctcagatctagttcttttttaattttttattatttatttatttattatactttaagttctagggtacctgtgcacaacgtgcagttttgttacatatgtatacatcggccatgttggtgtgctgcaccctttaactcgtcatttacattaggtatgtctcctaatgctatccctccccctccccctccccccaccccatgacaggccccggtgtgtgatgttccccttcctgtgtccaagtgttctcattgttcaattcacacctatgagtgagaacatgcggtgtttggcacatgcacacgtatgtttattgcggcactattcacaatagcaaagacttggaaccaacccaaatgtccatcagtgatagactggattaagaaaatgtggtacatatacaccatggaatactatgcagccataaaaaaggatgagttcatgtcctttgtagggacatggatgaagctggaagccatcattctttttttacttttagggaaagagcagtggacaagttaagagaagagacagtgactttcaaatatggctgcatagaatcacttggaatgcttaaaaatactaaccccaatccaattaaatcagagtctttggggatgggactcaggtagtggagagcaatgtgagtcccagacatgagaaactgggaagcaggaggtcattttgattaaacaatagggagatagcagggctatttccaaatgctacaattgggggctacttccagcattatatatattttcatatagggcttcctttcagtttttacaggcatagggttgtctttaaactagataatgatcttgctttctgcctatgatttctggcctttgtagccgcaatagatgagagattttcaattgtgaaagaccattggtggggaaacttcatcaaagagagtggatgtttgtggagaatccagaagctctgatatctttttgaccattttgatctggtggccatttctaaggagacaataatgtttcttcagattaaacaacaaggtaaacaatagaaaaaaaccccagaatcagcagctgttttatgagggaggactttactattgctagccacttttgtcttttggttttctagaattccagacataaatgtttctgccaaccttcccatgcaaaggaagcaatgggaattctacagaaggtgtgcagggaaaccagaaaaaaaaaatacatctgtctactcagaaatgttaaaaagcaggatattaggttttagggtgggatcgggctatattttaggaagtttagatgttgaacgccagtagcccttatgcttggttggttttaatcaatgctatcagtcacagacttccatatacatgaaaattcattaaataatctcatttgttgttgttggacagcctaggtatgttcagttgcacctgagtgtacatttggtctgtgttcctaatggttccggaggtttagttgagatcagtgggacggacacagaaacagcccctgttgagaaacacagtcatttgtgtgtacttatgccgaagaagaatggctttactcaaagagaggactaagtcagtaaagaggcatgagtgtgtatttataaaatgtgtgcaggtgtataactttggacacctgaagggcccacactccttcagtttagttttaactgcttgtttcaaaactattaataattttgcacaaacctctgagagatttcatttggattttgcagtttatttcaatgctgtttaatctaattgcccctttgttttgttcccccaaaatgatcacttgagttttataatttttagaatttcctttgaaccaactgtaaaggaatatgatggttcaattgttgaaaagagagattaaagccaggtttttatgagaattttgagttttaaaattatactgccagtgtaagatgaatataaaatataaaatggtaggggccgggtgtggtggctcacccctataatcccagcactttgggagggagaggcaggtggatcacctggggtcaggagtttgagaccagcctggccaacatggcaaaactctgtctctactaaaaatacaaaaattagccaggcgtggtgtcatgtgcctgtaattccagctactcaggaggctgaggaaagagaatcgcttgaatccaggagccggaggttgcagtgagccaagattgtaccactgccctccagcctgggcgacagagtgagaccctgtctcaataaataaataaataaataaataaataaataaataaacaaataaataaaataaaatgcgaggaactgaaccaagagtagaattttctagcctcaggagtggggcttcagaatcataactatttgagataatctatgtattttaagaggattataagttatggtgcaagaggagttttgtagcatactatatgataaactaaagaaaatagaatgattctattctacagttgaggcttgaaataaggaagatgagggtaagtttttctaggcaatgcgtacgagggggtgaaactggtaagagaatgctggcttacctatttcttagctgctagactgcatacatttgttgctatcagaggcagttttgtgacttgttttatgagagttgagtatctctagttgagagacatctttttcactacacagaaattattcatttcattttcactgtgttaaataaaatagtttctgctatagagtgtttacataccattgagataaaataggaagctgtattctaaaagttagacccaatattctgaacccagtggagatgaaggcccaaggtcaggccagagttgtcatgatgccctcagttaatgtttttgaagcttccacttggtgaatgattttggatgaaggactctttttgtaattttataagtgacctaattctctcttatgaaacttattttgagagtaagcagaaggaaatggtagtaataacaagattggtttgtgctcattcacacttttctgccatttggattctgggagtggtagggtgggatacgggatggcagaagaaagaatgtggaagaaaaacagatgtgcagcagaaaggggatgtgcaaggtgcagcacatttggggtacctgtaagagggtttctttagaaaacacagtgctaataactcaatatttaaaggctcatatttgggggttcacatatttccattaatagttatgtgaaaagaaaatttagcaaaatcagattgatgactgatgtaatttaattagactccagcctcataaatatgcaatgttatttgaatgaggagttgaattattaggctccctgagaaaaaaatgacaatctggtttgcttcagagtttgttgcaaacatttctgcccttgtataaatgtgtaaaatgatttggtaatttaaacactagaagaaaggctaaatttaattgaccagttgcagtaaccatttgtagatattttttgctctcctttgcagccctgactctcttttcctcttttgtgattggggatattcctttcttgaaccatgccttctataatagctttgggagatgctactgggttttcattctcctgataatttcacgctgccttaaatcctttgcatggtggctttactagcacatccagaacaaactattaagactttataatgatattaaaatcattcagttggccaaggagacttactgattttttttttttgataggttggcaggatgaagtaggggaagggagcatgagagtactttctattttttttttttaattaacctttgttttgaataaaactctggccaggctaaatacctgaagctgtgtgaattgataagctcaatctccgagataatttggcaactcagtgtactggagccctctccataaccatggtgactctccgagcagtcagatttttgctcttttatcttctctgaactgctctttacttttggccaagattctttccttttcactttttttttttgttgttagttggcttaagaacctaccctacagtggatgaatttgcagttttcttttcttttttttttttttttgagatggagtctcgctctgttgcccgggctggagggcagtggcgcgatctcggctcacaatttgtagttttcttaatgttttatcagttacccgactattttaaaatcccatttctaaatattttccttctctcttgtcttcccttcacatttgaaatggataaagcagaagttttgtttttcatgcctaccttccccagtcaccatctgcaccatctctgtattctttctctttttaattccctgcaagtgttgcacagctctgtattctctttatgccattttgttagattctttgctgaaatgaaatatatgattaataaatgggaaggcctttactagtgattgataactactcttagaaacactgtcatttgcaattcattaaatgccttatttgccatttatatttactgaaaattgatactctatgtattagttctttctcaatgacagatcactggtaaatgtatcattaaaagagagcttaattccaatttgtcttcatttctccttgaaataatcttacagctgtcatatggaccttcttctccattccaatgcattcctctttgccagtgcccacaattgttctctctgatttatgaattcctttccttagggcaatatcatattgtcagaagacccaaattcaaattctatctctgccactggctttgagactttggacagatagttaatagaccccaacctcagttttctcatctgtaaagcgggaatgagaatatttacttcacagaattagcgtgaggttcaaatgagctaatacattggagaatgctttgttaactaaaaaatggcatttatattggtattgaattagcccacgtggtcctctagcttctttgaatagaacacttatgataatgccccatacttgcaggttatagatatattacaaataacaatttgcaaggaaaataaaaaactggccacagatacgtagtgaaaccctcaatgaatagcgtcaaatctctccattgcacagaagccagagccatcagagggtgcaggcttatcagtaaggagttggctcagtggggttaaagtcacagaagcgctgacctacccagatgtgtggctatgcaaatagagaacagtcagtatactgactaatttttcttcagccgatcctgtcctgaggtaactccaagtgctttcctacttctcactgctgtgcctccagtctattcctttatacctcagcacctggcctcctgattccttaatcttgctctgttctgggtttttcaccaaatgaagctttcttgatcaccaaacagatttctttccattttctgccaccatcctgtttgcctgaactccaatcttagggtggcccttagcatgacaggtggcaatgtgaaaagacttctgccctcccagtgctgcctcttcctgcctatggagatctagagtgtcactggtggggcttcaggtgggtggccaaaggcttcatgccctctgtgggagaatgcattgacccttatcccccagaatatctgatttcttcacaaaggcatgcactgattggacaagggagggtgacataaccttggaatcacctcctcataattttgttgagttcagagcctgtctctctttctggcaaaccttgatttatgggaggcataggatttaggggcagagcacatgtttaaatctgtgtctactacttcgtagctctgagaccttggacattgacatcacctctataacacggagatgagaccaccgacttcataagggtgtggtgatgtttccatgacgtcatatttgtactgtgcttagcactttgaaattctcagtaaaatccttttcttcagttctatgacctctgtaaagctgctactgttaccaccaccccttacagaagagaagccttagtagtaaaataaaatattagaatagcacagatggacagactcctacaagtaggtttctcctcaaattccattaaagtgtcaatattttttctagtgtttctctcttctgaccagcaccttagtagtagtcattaaaattttagaatggtgacagacaatgttttggagaagacttttcaacacttttttattgacagcccaacttctttcaaccttggatgaacttattttcacattctgatctgtgggctgacaaatggtaaggttgggcctgattattctttagggtcttaattattctttcagtaggtaatttaggatttatcaactttagaaatctactgttcatataaaatattaattttttttgaattaaaaattttaataaaatatcttaatattgctcaaatcaaatattcactacgtctcttataaagaattatctctgtgactccaggtttgctctgaccaatacacgcaacagaagtttttaagattcaccatgtggttcactgtgttgtgtctttttcctgttccagatagaggcttattttagcagtctaaggcccagaggaatgatgaagatgaggcacaggtggcccagaatgggacacatagcatagcattagcaagaaataaacttttcataactcactgagattttggagttagttattatggaagcataacttaacctattctgactgatatagtgcatgtcataggtatagatacttatgaattttgattaatgttttattgatgtgccaattatatatcctatcttaatacttggggttttgtgaactgtgaattatgtttaaattgcaattggttttaatttattccttttccctatactgattacaagagtttcatgtataatgaagtatatacttggaagatattagttattaataaagaaaaccaaatttaaactggcttaaaaattaagggaatgtattagcttaggaaacagaaaaatctaatagattacatgcccaggcacagtttgatcaagactctggttctattattcttaatgtttctcttggcccttctttcttgtgtgttggcttcagactatcacaaaatgcttcactatatactttgttattcatattcagtaggaaagacaaagcttattttctccaaaactttgaaaagaaatcataatctttcttctaattggactgagttaggcaatatgtcagcttttgaagacacttctgtggctagaggaacactatgcactgattggctcagacgtgggatacatgcccatctctgaaccaagtctgaatccatcgctggagcttggaataatgccatattaatatgggagagctaggtgctataacaggtaaatcccaacttctctctggattaatacatttattaagtaaacatttattttttagttatctcgtagactgatatgggtgttgctaatcctaatgattggttcacctccaggagcttattcagtatcttagcactcttccatcttcaacgtggcactccaaaattgctgcaaacagagaaagagaccttggagaagatacatctacttctcaactactttagctcagaaatgacacacatcacatcccctcaaattccactggtgagaactaatcatgtgacccctcctaggtcaagaaaagtgtaaagtgtgagaagatgccttgagtgggcatctgctttccagcatccactccaacctgtggaaggcggcatgaatctttgctgatcagccaactgactctgccacggatgttaatcccacccacgcagcacaaaagggagataaatggagtgaatattggggaggcaactaaccatgtcaaccacaccaggaagccaggtcttaatgtcaggcaggccttgatttgtgctgaagcagatgtgtgagccctccattgcctattagactgaccaataagatcaaaagtccatgtattacttgaaaataatttcagaaaattatatactagtaaatacatgattacttgtaagacgtcaagttcctctctctggaaaagcaggtgagggctaagggtcaggtgggatgtgaggtagggtgcttcttctcagggtcatggtgcatggtagcagggggctaatactgtcagtcatgtgtaggaggactgctggggataaacctggagaatgtgttcatgagggtcacacaaaggggccacatgcagaactgggatgaagtccacattggggaggtcttggggaacaagacagtgcagaagagtgagaggaaggtgagtagttaggagggaggtggttttatgaaattcaaaatttgaaatgtagtactaatgctaggggaagactttaaagtgctctgagtgtgtaggcaagtcaatggagaaaaaatacagttcactacaattatctactacataagaattttaattatcaagccttgcaacttgtataaagtactttgggaacttttttcatccttcaggtgtcagatgaaatatttcttctccagagagacatccttgatgagaatttcctctaccattgcttctttattactgcattccatgttgaagttttaatcatttgtttgtttactttatagagtttacctttcatgctggattgcttgctcaaaggttatgtctcctttgaccccagttgcatactcattaccttgcactgtgtgtggaataatatggaatgaatggtgttttcaatattttatgagcccatgattataaacatctattgatttttaatttgaagagtagctctttcaatccaattttgatgctagaagttaaataaattatttcaaactttgaaaacttaaagatcacatataatgaatttgtgattagttgaaattccacttgagtgaatttgcagttacgtaagattttactgttgtgtgatattctccaacagtccgaattaggacacagtgccagagagctcagttcttctggttgatctttatttcagagttttgagtcatccataggcctcaaatatctgaggcccgggacaacttggctgtaagttcctgggaccccagagtcatctttggcatttccaggcctagaataaaagtagattctgctatccacagtctccaagttgggtctgattccagatatttctgtgtaacaaatcaaccctaaacttaatggcttgaaacaacagtttattattactttttgtagttctaggtgttgactgagttcatctgggtggtctcatttgcggtctcatgtggctgtggtcaaatgttggcctggggctgcagtcattagaagaccactaagctggatgttcgagtggctcaatcgaatggctgcttgctactggctgtcagagttcagttgaggttcttgaggacatcaatgtttgcatatggcttctaacagcacagtggctgggttgctggagggagcattctaagctgcaaggctttttatgacctaacattggagtcatgctgtgttgcttctgctatattctataggtcaaatgcgagtcccagggccaacccagatttgagaagaggagactacacaagggcacgaatactgggacttacaggtggatagggtggcattttcagagactaggtattgtagtctatttagaaatgaacagatcacagtctagagtgttaggctaggtttgctcacacaagactctttgctttattcagaggttgttcgtgtttgctctagatcatggtgggagtggggaaatgcctttctcgtggacggatgtcccaattcgggaatgtagaattgttgtaacttaagattctctaaaatatcaggaaactgaacccaagagatcttaactcttcctagtctgctgcatggctcacctgatataatggtcaactgggggacaggattacgaaccttcgaaagtctaaaggttccaggaggtgtacgctcctacttggcagttataaactgctaaggagtggctgcattgtatttagaagttcatctgacccttagattcattagaacaaatatcccaggcggttgagatttctgggctgcttcttgtcactgaattgtgaatcttccccatcagtctcctatttcttttttctattacatgaaaaatatatccagacattgttttggagcattagaaaagagtggtagtttctaggagacaaacatgtttgtcatgcaaattaaccccttagtcttaaaaaagattcttactaggggaagggaatagatagtgaaaacttggttttaggaaagtgttttataaaatttcttgatgtctgtgtggataaggtgatgaaaattggcagggtgagttagacatctggtgaaataactatatctaaagatcttggatctgtcaaattggggagactagtggatggctgcaataatctgtcctcatcctacattatttcacattggtatctatgatgcagacagaatgctctcaagctttttagatgacttcaccggggtatatggccaatataaaagataacaaagtattatccacattactttttcaagttggagctctgcctggtgatctgcaaggtgtctctcagtagatacaaatgtaaaattgtgcatttaggtttaaaaaattaattgcataattatgggaaggctcgacagaagatttaggtgaagaataactagtggaacagaagctgtgatcatgtggcttctaaaaatctggcattatattagtgcaataaagaaataaattaattatgaaaatgatccttccctttatactctagattatttagagcatatccagtgtagttcacccaatattggttgttacctttgaagaagcacactgacagccagagtacatgcagccacatcctgtgagaaactataggattttacatgttcaatgaatatttggaaattcaagcagcatttgagaatggtcttgaaagatggattcacttttgatagaaatgtggaaatgcagagaaaactatgtgagctgagtcagagaattatgagatatgtccaggaaatggggagaaccacctcctttgttttaagtgcatggtgcatggcagatagcaatgggagatgaggctaaaaatgtaggttggagaagatagttccaacctggaatgctacatcagggtgtgtgtatttacctcggtaggcaatgggaagtgatccatggcttataaactaaggaataataatggtaataatgatgatgataataataaagctcataggcactgttctaagctcttaaatatattaactcatttaatttttgcaatagtcctatgagttagacattgctatcatccttgttttatagatgagaaaacaaaggggcagaggttcagtaacttccccaaagtcacaccattcataaaggtagagcagcggcctggcttgatgctgtgctctgacccccttccccggacaatgccctggcagcgccacaagggctgaactgcatgagcctcttctgtgccctctgtagtgtctgctgcagcacccagaacactgtggtcctccatacacccatcctggcctagcatttcacttctcgcttctgcttggaacgacccaacagaaaaacaaggtgctggagataaaggaagctgatgatttaaaaaagtgattaagaagccgtgtttactttttggattttgaggcctttcaagtttcaggtttgaacagtgggttgtgggcggtgcatctagactctggttcactgccaagagctgggtgtgtctagtacagaggagtgatttaagagtaatttaagtttaagtgctcccaaatgaacattaccccagtagcataaggttaaattctggctttgcaaggccccaagcagacatttgaaaaagagaactttggccctttgttcaaatcccactgatgtctggatgccttgtgattctggtgctacttgggtggcattgatgtttgagagagagaaaaaggttgactggagctggggcccttctgccctctgctatttgcccctcttcacccttaccaacaagccttggctaacatcctcaagtgagagagattagctattgaaatagatggtctgagttagtaagacagggtgtgggtttaacagtgacttggataaacttacttgtgatgctcctgtatgaacacattagcttaaaaaaatttactggggcatgatctcaaaagctctgtaaattagggctaaaacctgtcccaataatgctggctaatacttgcttatcttgttgccagcaaagaggtgtgtgtgtgtgtgtgtgtgtgtgtgtttgtgcacacatgtttgtgcatacccatgtgtgttctggagacttgggaatatttagcttgatgactatatttgttttgaaaagacctaaagttagttcagtcattaatgcagttttcctctccttctgtgataatggttcaggagcatctcagtgctcttgctcctgctgtccctgcactgtggctggcagtcctgttctgtcacactgaatggccccattctgtgggatgagttctctaacagcagggctgtggtgtggacacaagccatgccgtttctcaacaactcctcccctgctgcctgtcgcctgtttgttttttgttttttttttttttttgccagggtcactactgtttacctctctctttctttttcctttttctgtcttactttgtttcctccctgacacttcaccctttgcttgtcttaggctgtttcttagttttcccttcatcttgacccccaaccttagcctctcttcttgagctggctgacgaagcatggccactttacccaaggcacgatgagaccagatcactgcacaaggggctgaggtccctgacattgagtgctgggatgcttggagaccacctttccagtggttgatcgacacagagtgtgtgtgtgggtgaattattctgtgctggctgtgggaaacaggcagtgctagatccttggcaagaatgttatccatgtatagtgatgcccacaccctccaagaaccttttgttctttgaatcccactcctgtgggttgatgttttagtgagactagtgagtagcccagcatttttcttccttctaattcatttaacacacacacgcacacatctatcttctgctaagatgtgtaagtatgagataaatgggaacacaaggatcatattgtacttgagttatatcattgctgacttcctgagaaggctgttcaaatgactagaggatgttaactaaattgacaatgtgtttctctgaagtggaagtgagcaaaacatctgcttttataatagtctgcttgcctggataggcatgtaccgttttgttgttccagaagactttcaagcaaatatactggtgagtttcaatggcttggaacttcctgttttgtgattaaaaaaaaaaatgcctttggagaaagggcaatgttcacaggattcagtgttgctttaaatgtattctcagtccccaggttatcacagggaaagattgattaggaagttacatgggatagaaagcagatgataggtccattgcttttttcctttagtgcatagcatttgttgacactgttgtgtgatacaatgaacctagtgttggagatgctaaggccaagaaatacagaacattgaaaggacaagcatcctacaaaatgttcaggaagtccatccaagccttttccttttgatttacaacctttgttcagatagggcctcggaaaatcaaaccaaacaaaaataaagacctttgggataagctaactcagacaggttgccatgaatttcatgaagaatttgagggacataatatttaatggtgatattggcagataaagcagtttttctggtgtttgcacgtgagagaagtgactctggccaatctactgtttgactcaaaagcataaacttggagagtatggaatttttaaattgtcacctcttgtatgtggtcttgggcagccatcttcatcacctctttggactgtgagttagcccatgtgtaaaatagagcggtaagtttagattattttttaattcaagatgatgctctgtgattgggtgactatctttacctctttggagtttgagtcattctgtctgtaaaatgaagctataaatctatttttttttctccgaagtattacctgattggtgaatgctagatgactggtgagggaatggaatattttgcatgaaggaaagtgtcattggaatttttagcacctatttttaaatgaatctcacgtgatatgagatttctgagtttttcacatagctttattttgaaacatattttgaaaaaacatgtgttttgaatatatatatatatatatttctctccagaatgcttctgaataaatgaaaggaaggaataactgagaacagaggatagctaatggcctttccttgctctcagttcaagctggatctgtatattgccttttacacaaaccaagtgctggtgtagacagagtccctaaacttagcagctcatggaattggtgctgagtacatggtagagaaagattcaaaatgctgctgttctacctgagatgggaaaaatgaaagcaaaataacatcaacaagagcagacaaactcagccttgtagttccatgtcactagcctggggtttcctaaactgtagggtgtagactagaatgggggtaatttgggtggctcatagcctgagtactcaacagccttgaaccaagaagtgagttatttagtttcaagctctcttttagtccttctaataagtgcaaatgtaaaatcatcattctcggtaaactatcgcaagaacaaaaaaccaaacactgcatattctcactcataggtgggaattgaacaatgagaacacacggacacaggaaggggaacatcacactctggggacagttgtggggtggggggaggggggagggatagctttaggagatatacctaatgctaaatgacgagttaatgggtgcagcacaccagcatggcacatgtatacatatgtaactaacctgcacattgtgcacatgtaccctaaaacttaaagtataataataataaagtaaaataaaaaaaatttgctattttctctagtcaacagaaagacagaagcttcatcagataacagaatttagctagaatttattaatattgttttgtcttctctctttttatgattccctctattatagcaaaagatactgactttccatttgaactgttcttttagaatgaatttaggggacaaaagtgagtgcttgaaggaaatcatgaagtagctattgcccaggtgatgcacagatatttgcaaaggaagtactgggatgagtgaagtttgggaaacactagctgcagatacatatgaaagcaatttaaaagaggcaaggctgggctttgaagccagggcactgatcccaaggctagggatccttctgcagtctccttgtgctccaccactgcagagctgcctgcagcctgatctggatagctgatggaggaggacatcaatatgcttccctcagcattgctatcaggttatctctacatggggatggaggcttccctcttacaggctgggcaaagtctcatgagaatgaatttggggctgggcagagtggctcacgcctgtaattccagcactttgggatcccagcacttttatgcaaaccaagtagtggtatagacagggtccctgaacttagctcatggaattggtgctgagtacatggtagagaaagattcaaaatgctgctgttctacctgagatgggaaaaatgaaagcaaaataacatcaacaaaaacaaacaaacagccttgtagttccatgtcactagccagggatttaagaccagcctagagaacatggtgagaccccttctctacaaaaataaaaataaaaatacaaaataagctggacatggtggtgtgtacctgtagtcttagctgctcaggaggttgaggtgagaggattgcttgagcccagaaatttgaggctgtagtgagctgtgatcataccactgtatttcagcctggggaacaagagtgtgactctgtctttttttttttttttttttaagaataaatttgggggcagaatttccagaatagtagctctttctccccataacttgtgaggattaagagaaaaatgccccaaactccatccttctcatgggccccttgtcaaaccaaggtgactttctgaggtagccactcactgggtgccagaaaaccctgagcctgtttatccagaattctctgtgcctgtgccataagcaaaagttttgtgtctttagcagagatgatattgttccggggtttggctttccctcacccccaggggcacagtagatgctaatgactttgtaacggcagcagggggtcatgacagggagctgctgtgtgttgaggagagaaggcatgtttctttcttcattgtgtggagagcgtcacaagccactctctttccatctgcccatcatgctgggagttgttcagatggccaatggaggagcaggctgggactagtccttggcagggctccgcagaagggctgggagaggtgggttgacaggggaaactggcattctgctgttctcaggaggctccgctttgatggatggctgggcagcctgtgctgcatggaccaccagtggttgttgaggtggtgaagtgtgtccccgttaactccactctgggcagtgaactgaagagggagcaaagcccaggaaatgggccttcgtggcagtggtggaggtagagtgacccacagcaaacctccccacttgtccctgaccattcagtagttccagaggcagtgagcttggaatcttagcaagagagatcttggggtggggtgtggactttccacaaaggcattacctacatgcacgttcccttacacatgtagccttccaatctcatacgtaagaacacttatttaagtaaaatatgcctattccaacagcaggagctctcggctggggagtagagttgttattagtttactatttagtattaactgagtaaacatttagaaaggactggatgggggtgggcacatggggctggggtgcatttgctctggctctacatttatgaaggacctcaaatttcattatgtgacattttctgtaaacaagggtatatatactacaacagatacacagaggctagaaaaaagtccatcataaaacttcacacttgtgttctattacaaaaccacattgtctgcatggtattatgatgtcggcaaatatataaatcttgtatttatagacatttaaaaaatgtaaaatgcatatatttattatatgtaaacatcataaatataccataacttttatatccttcttttcctcctcctccaatggctatctttagagattcaaaaaaaaaaaaaaaaatttcaagcagcagcaagacactgagatgagggaggggaggggatgggatgggatggtgttctttattgattaagtgctttgagttctttgggaagtcaaacaccacagaaatctacttagcttcagcatattgcttgagaggtactctagtaagccaaagtttgcctggtgtaggatgtttatcctaaagtggagtggccaaaaatgaatgccacaaattgccccactctgaattctgctcctcagggcccaatagctgactttctaatctgcaagagcacctgtgcttcctggtctctgggcctttgcaagtgctgtatctctagcatggacagggaatgctcctccccctgagctccttcttgagaactctgaatcatcctttaagacccagagaacttgttatcacttctttgatacattgctggaccgccttttcagcctggcccctgaactcccactgcactgcggaatgaattgttccgtcccctgagatgctttggagtcttgtgtgtaccttgccaatgtatagagatagctgtgtgtgtctcaccacaccatgagcttcctatatagggtcacttctaattcatccttgaatcctcagccaagaagcctgcaaaggaaaggtgctccataaatgttaaacctaattgaatcttttaataaaatgatgagtgtaacctctaacactataaaaattaaacaaaaactctcagaagcaacaatgtgcactaaaaattaatttgaaaaatttccttccatatactgttagcaaagtacttttcttttataggcctctcctgtgctataaaactcttgagtgttctaaaaatatttttaaaaataggcatttagaacctctttaatgaactacttccaaatgtggctaagatatttgaggctttccccgcagcaggtgtaaaaccagcagttggagctgaacaccaagaagtgggaattcctggctcagagatggagaggtgtctgtctcgaagtttcacaggtggcaggtgacaatattcttggtagagaccctggttaaagggttgaagttctctctgggggtgctctttggtatgtagagcagcttcctgagctcttgcaaaatagtcggtgcatctcaagttctccgactctgactttatgtttgcacaggcaggcttgaggcccgccacgtcacctgtgatctgaccacagcactgctcaaatctgcggtgtaaatcgcagctttatccacttgctcacagaactgtaaattaattcttgtcctctttcctgatttcctaattgtccttgtttataaacgtgctttatggtaaaggccattagtttatctcacaagttaaaattaagaagaacaaaggctagtctaaaatagagcagaaaacaaaaaataaaaaggtattgtggaccaaaaaagaagtatcaattattttatttgcttctaagagtttagcttcaaatgctgcccttagaatccattattactagaaattcaaaattacattccaatttagatttagattgcaatgctgatttttttccttgtgtaaggaataacaatttcagattttatttcaaaagtaacatgttcatctctgattaaagtacaacatatatgtaattcaatgtaagaatccacttaagtatttttcctttgcttggctgatgccaatgtgtatttcatgcagtgtagaaaagcattaattaagctgctgggtaatgtcactccatatcagtttcaggtatgatcatgtgaatagcgagaagtataatagctgtgcttgtatcttggcagcagatggcttttcgctgctgcctcatttctctgaggctctgcagaggccaaccacataaaatgactttcgcatctcccttcaaacctcacgacatagtgccatttttgctgggccgtgtacacctgctttcaccagactccagtctcgtaaaactgtcaattggatcctttcacaagaatacattagcattgtttaaggggttgtgcatcacttttttgactgctgtaatttgttttaagcagaacttaaaatgattaattgattgatccttctttaaggtattacaaatacagaccaacatcagcaattttagtgacacattgaacattcacataaccctcatatagcattgttatgtgtgtttgtgcatgtgtgtgtactcactggggtaagatgtttatggagacatattaagaactgagaaagggaaaaccccacttatttgagagtttgggaaaaagagaagcagggataagatgaaagagaaaaaaaaaaagagaaaagaaaccttaaaattcacatggaattgtcaaggagcagagaaaagacatccaggatcttcaaggcctccaacatttctgagataatcaagtaaaggatgaaacactgaagactgttcctagaaaccaggtgtgttttaaatgtaaggaaaaaagctaggctgctcaatcctttaaaacttgaaattgttgctatcacgagggagaggaaggctggtgtggaggtcaggccctgggcaaaccaaacctctgagctactcaccacaggctagttcatctcagtgttctaatgagatcagtcgaggctctttttgttgagtgagagagagagagaggaatagttacagatgtgacatttcctaagactttatgaattaaatttcctgttaactactttgagggcaaatgtatcttaaagcaacagggtaccttctgctcccaagctccgctcaatgattattaactctttaattgggcaaagtctgtttatgccagtcagacatagagaaatttacatagtgtacatattaccgtgagaattcctctaatatacaattgtcaatcaaagtagagatgggtcttcaggtttaggagggtgaggataagttacaccacaaatgcaaacagatacagctgctgttataaacacaccagtcctatgtcatgcttatctgaattctttctggtactcacttttaaaccaataaaaatttcaggaaaatgttggagatatttttgtgccttcagaaccatcacttacataaggaaacttttgaataaaatgagtttttggaaataaaagtggtaaatggttgtaatataagaagttacataccaaataatagcttatgctgtattttcaacatgctagtttttggatgggtaatttttttggtaataaatctgagttgggtctgaaatgggaggtttgtatttactgtaggatctgtacttccgatcatctctcctaatgtgggaataatttctgattgctggtcaattgtcttgagattctcagatggaaacgaagctcacattgccaaatatttttactgggcctaatgatagatcacctgagtgtatccttccttaacaattaacttcaatttagaagacatttagagtcttttggaagacatttgatagcaagtgaagtgatttgtggaaagactgtgaatttcagtctttcagatgaaagatgataatgggattgaagtctttttttctgatttattatttatgtttctatttcttacacagtgaaacttcctatttttcagggaactgaacttgtttcagcccgatggctgatacaattattagagggttgtgttgctttatgggccctatgttaagacttttaagtaaatttggtatgtattactaataggcaatgcttaagagcctggcaaaaagagaaaactgttgtgaaaacagctttaacctgtcaggaatgagagtgagaagagggagctaaataggtgatgtagttcatcatctcagattggtatattttggaggaggtgggagaaaaagaataaggtaatacacattccattggaaaatttctagagaatctagaaatttaaaaaaatctaagcaaatcattgttcttctaagaaataagtctcactattaatttgtcacatgccaaatgtttgtaattgcctttgggccactatgggagggttttcgttcatcacagccatgaaaaaaccacaatactgcttcctaaagccagttttcttttctttttccttcttcctttctttttttttttttttccaaggacaaatctccttgtcctgagctcagaaactcagaagggttgggagctttggggatggccagagatttcaatcttgatgagaaattccttgtcagtgacaagttgctataaagcagggcagttttcccagaggggctggtaaaaatacacacgcattagtaaagtaaagcaaggggaagacactgccaggtctagctgtccagtcagaagtcaaaatgtttgtgcacaccagacagtgtgtctggctacctcgagggagggtccatgtttggtctgggaaaacagttccatgttcaccaccagggaaagcctgtgggtgaataacaatgaccaggccctactagccaggaagagcctcttttctaaatggctgtctcattaggttgagtgggagtgtttttcagcatgcagctttgagacagagcagcccgaacagctgttcccatcagagggtagcacacaagtctgtgaacccagaatgcttccgtggactggcctttcagtggaaggcggccacccacttggtggtgttgctgtggccatcctcaacttgtctttccatctctcttatatctttaggggattttcagccagtgtggagtgctgggtatattctagaaggctgcacaataaattctcactttccaagcaaagatttttcagcacaaacatccaagaaggcagtgtgtcatgctggtagagaggcaccaattacataaaagccagtgctggtcagcatgtgtgtaattatttatttcagctttctgtaaaaggaggggcattttattcaagccaggcagaaacctggcagtttcccagttgtgaaattctattgacaaaggtgttaagtgaagggcagggtaacgtggtatgctaggcccctgcgccttcatctctgtgacctgggcatgtgtcaggcccagactgaactgaccagaatgactttgatttgatgaccgttaaaggtcaggcacataatgggatcagatgtgtcagtggagggtgaagtacatagcataatagattgatggtaattaagtagtcgtgtttaataagagtcatcagagttaaaggcattgttggaatgagcagcttgggaaagcaatgagaaggcatgaagaaaggaggtgggaaatatgttaaggaataacttttttgttacactaaaggaaagatcagaagaagaccagtgtgtctctgtgtgtgtgtgtgtgtgtgtatgtgtgtgtgtgtgttttaggagacagcattttatctgtctaaaaattggtgtttttgtttttttgttcctagatgattttttttaagggccaagtagggtcagtagaggagaattaaactttatgaacttataaatggccccaaatcatcctaattacatatatgtgtatccagaaaatgtaaaccacaatcctccagataaaaatagttcaacaaatatttcagatgagattgggcatgttcaggatggtacggctgtagacagtggtatggccatagactcaacaaatatttcaaacattaatctatattttttataggatgagaatttgggttattactggctttttatttttatataaatcatagaactcctagaattgattaattgcttgttcagtgaaacttttgtagttttggaaaattatcattcttcgataatacttaatcatattattgtgaagtgttatcatttagtaagagagcacattgaactagaataaatgaataagagcaggttttgattgctgcaaccatgatacattttcagtattatttttgtcagtttgcacaaatcatcaatggtcattgggtttatatgcagattacgtaggttcaatgtagaatgagcaggtgttgagaatgcaaacagttaattaggatgacattgactgtaccatctgataatggagagtccaggtaaggggcttcacatctaatctgaattgtgacttgacaaatctcaatgatcccttctttgtgcgatttctctcctagttctgtgtcacagatgtatactaaagaagtgttctggcttacagaagttctgacttactcttttcatctgatcttcgtttcagtaaatctcaacctgaaagcagagctgagttgggaaaagattgtgaggtggaatttattttatttttttaatgaattacctgtctttcctccttctagcaaccatgacctgggcagtctgaccccagcgcctctgcacttaaccactatattatactatctgagagttctcaagagtatggcttcgtttcatgagagttttatcttatctttgaaactctggtgccaacacagtgccaggcacacaataaaagagaagttatttaatcagattaactcccactgatattagctaacttatgcattctgacaaaagtgtctcaggaataggtgatataacctttgcctataggtggaagttgatgttttatgagatatatttgagtgggcaccacaaatagtatcaggcacagagccttctgctcttgctcactctgaaaatattctctttgcagcgtgtgacccaaagtaagtggggtcttagctacatggagtccaatggctggaagtgatgttagtctaactcctttcgtttaaaaatgaactgattctgttggcggctgggcacagtggctcataccctgtaatctcagcactttgggaggcctaggggggcagatcacctgagttcaggagttcaagaccagcttggccaacatggtgaaaccctgtctctactaaaaatacaaaaaaattagccgggcatggtggcgggtgcctgtaatcccagctactcgggaggctgaggcaggagaatcgcttgaacctaggaagcagaggttgcaatgagccgagatcgcaccactgcactccagcatgggcaacaagagtgaaacttcttctcaaaaaacaaacaaacaaacctctgttggcatctgtgtgacagttcaaaatatttagtatgaagaaagagagtttggagtgcttaaaatacagattatcatcttttaaacttgatggccaatgttttatctcatgtcttgtctcttgattggagtcgtaaggaagtttttcttctttttatagggttttgccttacctctcctgtcaatgatgcaggtaatggtgagggctgagagtgacagtgcagagctagcactacagatgttctgggcacctatttattgacagtttgaggaggttacaaaaacaactcctaccttagcttgtttgtttgtttgtttgttcatttttgagacagagtctcactctattgcccaggctggagtgcagtggcacgaactcagctcactgcaaactccaccccctgggttcaagcaattctcctgcttcagcctccggagtagttgggattacaggcatgcaccaccatgcccagctgatttttgtgtttttagtggagatggggcttcaccatgttggccaggctggtcttgaactcctgacctcaggtaatctgcccgccttggcctcccaaagtgttgggattacaggtgtgagccaccgtgcccggccagcttgtttattttttgaaaacatttataaacaatcaaatcaaagagctattctacaacaactgctactactattatgactactagttgcttacatttatggagtactttctgcatgccaagcattgttctgaagacatgtagcagtgcacttggtcctcacaacaactcaatgaggcaggtgctattaatatgcccattctatagattaggatagtgagacgctgacaagttatgtaaattctcaattaagaggttaagaaatgtgaaatagagcaaagtttcaaattaacaggaaaattcaccaacactagctgatataccagacaatttttatctgttttaaattctttataaggttggtttattttttagctagagtagacatcttaggctttctaagctgcaagggaaattggagagcagctggcctcacagcatcactttattgattagaaatgtgaagctcagagaggtaaagtgactttcttaagaccgcagagctctttgaatctagactttaagccctgcactctttttcctatatcaggcaatatttctcatgctacgttttcattttcaaaatagcataaaatcctagtgtttagtcttctatctcctattttacagaaaagaaaataaagatactttaaaaaaactagatctcagttccttgttgagtacctatcgctagctctggctgctttagaatctgcggtgtcagaggcctggacctttgcttgctcccatgagcctggtgcctggctgcaccttgacgaaggtaacaataggtattatcggcctctcatattctgccctcactagggtattttggctgtggttacttcctgagcccatggagacaaccttggctgaatcacttaaaacactttttaatcagaaccaagcaccttattttaccaaaataaccccttttaaaggtgtcacaatttgttcaacagataagcatcaaagggcaatagaaaaactggaagcagacatcataattagatgactaaaatgaaagagcagagtgatttagcaatggttgaacatttggcaaagaattttcatcaggcttcatcccaattctttcaacagaggagggaagaagcttctgagaactgtttgaaatggtggaatagcaattaaaggccttcgtcattaacagagaggaagcagaaatgaatgttatttgcctaatatggcattatgggcattggaagccagagggttgcaatggaaataaacctgttgaaaaccaaataagatgaacacaggggagtacaaaagaaggaaggaagatgaccatcactctggccctctgagccttgtgttaaaatgagaattctgtccccttctaagaataagccttccagtatgcacttcaggaagtcccattgcttcggctcggatggctattatgaaaaacaaagcaattgtttgttgacacgatattctagcaggtgcagttccattttaaacaagaagccgctattgttttcaggaatcatgttgatgactgtcttagaacatgaagggctggttccgcagggggacaccagggtgctgtttttcattttggcccttggggccaacagttctcagcctctgcacgtttatgactagcacctcctacagggtggtgtgagttttaaaaaggaaggcaagtttgtttttataaataatattttaaaaaccctgattttcatattctgaggaaaattcttgggcagaaggggagagtagggctgttcagatatttctttggtagtcactgaaccctgggggtggaggagacacttgatttaccgtcttcagttcaggaggaagcccagtcaacaaggtaagggctgtgtggttaactagcaagtgagaagggactttggaattaaggctcggtggtggcctgcctttgttaaaatcactggatacctggggcccaatcttctccccaggtgaagggaggaaagagacagtgaggggagaaaagtgacagcaaaatcttgaggtgcctccctgcttcatgagcacccaggaggggaagggccaggtgggcaaaggcatccagggctctccttccttttgtgtagtggtgacacctctccagcccagccttatttgtgggatgtggagctgtgtgacgtgttgcggttgatttatgggcagcaccgagcagtaatccctcccctggctctctcctcggccttctcagcacagcggcactaaatatccagcccgactggggatgcgctgcggccggtgcacccggagtgagggctgtgttagcctctcaatttactttttcagaaccacgataaattcaggtacaaatggcagcaaaattaactgtgaaaatgccaccatattttgcaggccagttgctgttagcttcaatctggtttggtttttatagctgtttctctttagtagaaaagagtggacttttttttttttttaaatgtttagatgacagattaccagcttcaacaaaatgctgctactaagcagaagaaacaactgtcttttttcttagaggacggtggcttttaggtataatgcctactttatagtttgtgttagattttactatcttctttgagaaatgctcacgtattttttattactaatactgagcaaatatttaattgatttatgctctatatctcacatacagtggggaagcaaaaggcaaattaatattactaaaccagaattattctgatttttttaggtgggtgtaagccatggtgaaatttatcggttgttgtttaatgacccagtgttatcagctgtattttattttttctatttatttttgagatggagtctcactctgtcaccaggctggagtgcagtggtgtgatctcggctcactgcaacctccgtctcctgggttcaagcaattcttctgcctcaggctcctgagtagctgggactacgggcgcgcgccaccatgaccagctaattttttgtgtttttagtagagacggggtttcaccatgttggccaggatggtcttgatctcttgacctcgtgatccaccccaccatagcctcccaaagtgctgggattacaggtgtgagccaccgcccagcctattttttctatttttgataaagtgaactgaagtgacaaattatgtaaaaagctactgggccattatgaaatataatctggttgagatatgaagggctagtgggagtaaacgaaaggaagtgtgtgtggttcaaactcaccttgacacctatttgttgggccttcttagacaagtcacttattatttctatgtggaaatgtctttgtttctaaaatgggattaactatatgccatggccccatattgggactagatgcaatgatagatctgaagttgtgatctcattttgatggcactgaaagggaagacaaagaagcttaaggaggagaggaagaaaagtctagggtctgcctgggagctatgaaggaggagaaagcttggaaagagctcagtgcaaaggagctgagggttgaggagccaaggttatgaagaataaagatccactcacctgagacaggagaggggagacagttgttctaagaagtgtcccagggctggtcaaggctcaggagttcagggcctgaaactctcttcatggttctaaatggttggtatagactctgatggcaggtgggctacccattctttggctaaaacaattatcagtatgaaattttctccctttataatcccgcccctcccattagctgctagattctggccaatatgaggtaggggacaagtctttatagaccaaagttgctcaaagaagagaaaaaccaaaggcaccgcagaccaagttttataagtgatgtcagcttttctctaactctgctttggttgttgctctaaagtgttggggtcaagtttcttaacttcatttggactggcaggaaagaagacacctagtggaacttttaatcagacaagcactatacagtatactttgccactcaaagtatagtctatggaccagtaacttgggagcctgttaaaaatgcagactctcaggcccatctcagatctactgaactagaatctgagttttaacaacattcgcaggtgatttatgtaaacattgaagtcaggtcaagactccttctgggtgcacatgaacattcacaaacacacaaatattcattatgcaaatgatttacttttattgtaaggttataaaaatatagaaatacataaaaaataataattacctatggtcctacctctgttaggggtcttttaattttctttatcttttaattgaagaagtctagacttttttgtgagggggaaagccattcttctacaaagccactcccatatcttaaaaaaatatactgggtttgactaattgctcctagttttgtgggagggcgaagaaaatacaatgaaaatagagatataaccctagtttctgttgtgtcacaaactttcaagacttacaaggaattggagaatagaattgattattaactttaagctattctatactcattttaattccaacatttggttgatttatgttacaaacagatttggtatcataaatgggctcagagctctatgcatctaaggttcaacaaacctacttcatctgtatgtggaagttggtaggaaaacatgtatcagaatttcccttcctctttgagcagtctatctagaaagattaattgacccaactctaaagggtggctttgtagatgatttttagcaggaggtaggtgatgtagtttgaacaatgttttctttcagtgaagccgaaatctttgttactgcttttcaactataaggaataaattggccgtgtgcagtgactcgtgcctataatcacagcactttgagaggctgaggctggtgcatcacctgaggtcaggagtttgaaactagcctcgccaacatggcatctctactaaaaaaatacaaaaattagccaggtgtggtggcaggtgccagtaatcccagctacttgggaggctgaggcaggacagtcgcttgaacccaggaggcggaggttgcagtgaaccaagatcgtgccactgtactccagcctgggcaacagagcaagactctatctccaaccaaaaaaacaaaaaaaccaaaaccaaaaccaaaaaaactctaaggaatacatttctttttctgagccccctcttttcttccccaaacttcgtgagaatttaattcaccaaaatagggtgagatgaagctttccttgatgcctccatgcctcctttgcacaagttcaatgtttagaggtttcccagcaattgtccccaagcaggcagcatgctttgggcattgtcctcatgggtaggagatgctcctgggggagaaccagccagtatgccacagagctgagctcttactgacagcgactccccctctgcctcccactcccagtttcaagggctggctggctgggccattctcgaagatttggaaaggagccaccaacaggaatgattgaacaattgctctgtgaaacttgagataacactttgttccaccacagtggaattgctgtgtgacagaaggaaattatcatttagtttttggttaacatttatgtgagaaaaataaaattaaagttgatggtatctagtccaagaaatgcttgtatttattttaaagaatattaacttagcacttttgtagagtgagggtaaccatctttggaagattcattgtttgagttgcaattgaaatcaaaacaaaacaaaatgaaaaccaataatgtcctttaagaagccagtggaatgcctcctggctatcaaattcagttccctgaaatcaatgggatttctagaaataattggattatgaatataatggtatgaagtaggtccatctctatggatacttggaggtgtgtgtgtgaggagtaatcttatggatttttgaaaatttcaacatgtagaaaaaggtggacaagtttcactgagttcattataagttttgcaatcaaatgaataaagcaaacattttactactaatatataagtaatctcaatagttcttgtgttaaaaatgctagtagaaataacttttaatttagttctcaaagtatcaaattcatatgttcattcattcagcccatattttatcaagggccatttctgtgtaagcactgtctcagcccctgtgggtgatactgtgatgaataagacagggttcttgtgttaataactttatagttggctagaggagacatgaacgtggtgggtacaaggtgtcctgagaaagttaagccaatttaacaactatttccaacatctctctagcctgcttttcctttaagtatagggtcatgtatttgtgagcctatgtgttttataaacatgtattagtatttgcacttgtatagtgcttactatgggctagaaactttctagacgctttagagatgtgaactcatctaatatatgattattaaccccccattttacagataagaaaatggaggcaaagacagattggataacttgctgaacttggtggaggagaaggacttgaacttagcagcccagcttgagtctttctatgtgctgtgctgtgctgtcttcccgaagcgggtgcactagcagtataacccaaaaagaggtgtgcagagcttaactgggtgtgtgggctcatgccttttatcctagctgcccaggaagctgaggcaggaggaggccaggagtttgagaccagcctgggcgaaatagtgagagaccgtctttttttttttttaaagaattgtgcagagctcactgcttattacctggtagatttgtttctatcacttaggcctgtttaattacataatacatggttgtagcttatttctttagtagtgataggttcttgaaccgtggaaatcaagcagccataaatgtttaaaaaggaatccgggccagatttattcaaaggaatccgacatttgtaatatgaagactattttaaaaataaccagccttttgtttaactattttgaagtccagagtttccttattgttttttaatgttgggcatttgtttatatcatttttattgatttgaaattaatccagtggtgtatatgcatgagggtagttgctaggctcggttttggagaaagatcttcactagaggaaaaggaaaacctaaagctctgtttaagtgagggaggaattttggacaggcatcctcagtgatctagtattttgttaagagtatgggaaagagatatatttttatcctggagtcattctgagtcttatgctcatcagaaattcccatgctttagtttgtgtgtgtgggaaagagatgagagagagaaagagagagagagagaaaaaaaaaagaaaaaagaaaaagaaaagaaaagagaggagaggagaagggagggaaagtgaatgaagaatcttatggtgaaatgagatgaattaatgcatatgtgagctcatcagtttttattaatgagaaaataacaagcaccattaaacaaaaacattagatctaaaagatggaacataagaccaccttatctagttacactttaaagggtattttaacaaggggctaagactgagcctagttctagttccttgtcagcagaagggactctgttttactcattttatcctccgtgcctaggtgagagactggcacagaacaggtacccagtaaatgaatgtggaatgaatagagctagagaccttggtttctgcagaaagatctccagaccttcagagaaaacatctcacctcagaaggtattcactggccagatgccacattctccttgaagtcaggctgccccactgaactcactggctttgaagcagagtaaggcctgctcaggaacccagcgggaagtcttgtgtctgtgacctgggcccccatggttagagtcaggagattagagtgtccttgctccaaagccagagatacagacccagattactcagggtcacaggtccacattcttgtatgcagcaggagcattaattagtgacaattacctattggaaaaaagaagtcgagtcctgagtgtcccttccaaaaaacttaaagacagaaggaagcttctaacaatgggtcaggggagatgcatttccgccccgatgttaaaaacaaggtgctgtctaattgatgagtagtaggggcttgcagagacgctttgatgagccatctcctgcttcctgatattgtgacctctcaacaaacactgacaaataaaaccagcatgtcttcgatataaatgagagcacactatctaaggagatgcttcgttctcaggatgtggttgaaatcctgttatgaataaggtttacatccttgccactgaaataatatttttgtactgtggaaatcaatggtaaggaaaaaaatgaacaggtcatctaatatgtaaacaatttaactttgatgtaatctcttgtttgctggatttggtcctggggaaagtcaaaggactttcttagttacttagttgaatctctcaccttttctctgtcttctcatttaacttctcttctcttaccttgcagagcattttgatgatgagtccagctgaaaatagtgttgtgtcaggaattcagacttacggcctaaccctttctcttgtggggaaatctttaggtgtataggacagtgctaatggtgatttaaagtagaaccagcagaggtttggtctgagggaaggtgaaagcacgtattttatcaagttgagaacctgtagagaatttgtgggttctatgtttcaaacagagctcaaatcttttgaggctcaagttccatttgctcttggcaaaacacaatttcctggttcaaaagaaaataagcacataaaaaaagggcccccaggcttcttggacatcaaagcttacgagatactcttataaaacagcatttggatgatttttagattataggaaccaggaacatacagattaaaactacccttgaactacccttaagttaaaaagaaaaaacaagacaaaaagccaagggcaaagctgttggcaaagtgcattacactttggatgtttttgccaaaagtgagacattttagttagtcttcaagctcaccctcctttcaaatttttttgtaaaatctcagcaatgtcaagattccatttcagcttctgcctgatatctcttgaacttcacatctaaaggggtagccatgattcttttgaaccaacaatttctttaagaaattatgtccatattttcgtttgatgttcaagcaactttgattaatatatcctttaacataaataccaaatatcgactaatatgttaaaaagcacattgttttaaaaaatcattctagattagtgattctcaactgggagttattttgattcccaggggacatttagtaatatctggagaaatttttggttgtcataactcataactagagattcgggaggttggctactagcacctactgggtagaggccagggacacactgctcaatattttataatgcacgggacagctccccatcacaaagaattatctggctcaaaatgtcaatagcgttgagatttagaaaccgtgttctagactctggaggatcatagatattatgatttccagctacttaaatttatcccaaccaagattgatgttctttactgatttctggacataattatcagactgggggaagaaagaagaataaaaatgagaataaggaagagagagatatctgtaagactaaaataatcctttgggtactaaggtcaccatatctgttccattataactaaggaaaataaaatattttaaaaaagatatatagtgattttgaggtccagagattattagctgttataggaacgctctttaagtcagaaggaaagcaatggaaacaggacatgttaatattctttttgccattgtttgtatgctactacgtgcaactaaaaactgaagcttatgaaacacttccactcctcacaactgcctgacttgcttgtttgcccatgttggtgtttattccatcattcattcattcatcagacattgatgcaccctcagaaaagacagggttagggggacaaaatgtgtgaatggaagcgttcctccgcatggttgagagctgcaggatcccacagacaagtcagctgaggcagaagtacaaggcctgtattatgattcggcataatgtacaaattgcattggaagagacagtggcagtgcccgaggcactatctgtcactcttggtgaatttgcaaatgcctatcatagaggcagtttcccaagagacagaatggtatcctttgggcaaggtttcctaagcttagaaccacctgaagcatgtgttaaaaaccgcagcagcagcagtatcaacaaaaacagatttatcagctccacttcagctcactgactcagaatctacaggaatgggtaatttttaacaaatgctgaaggtggtttttatcataaggcaagtttaggaaactctcctcttaagaccagtaaactgtgaaacccacagaggaaacctgagtttagagtcccatccttagccctatcattaccccacacagactcagtcatccattcattcagcaaacaccttttgtgcatctactatgtgccagccttgttctagaggctggggatattgtgaataagactgacaaggtccctgctctcatagagcttatattcagactcaccagtgagaactgaaataactgtggagtatttcacccaagaagtgtcttccattatgtggatgagaaaggcagaaagaagctttgtattctggagtaatgtagggaagcattccctcttatgcacatgtacacagcaaatatgtttctggtgtccagaaatatctattatacttactatttgtatgagtttgggaaaattgtttgacgcctctgtgctcagtatcccatctgtaaaatagggatattatacacacacacacacacacacacacacacacgtaacattacatatatatcatttaccatacagagttgtttcaaggattaaattggtcaacactttcaaagtgcttagacaagagcatgtcacatggtaaacacacaatattatttgctattatcatcctcattctcatcattgtcattatcattatcatattcttccctttcccccattacatcccatgattccagtgccactgaggggaaaatatgtttggcaaccctagtagatcgtattcctttatttacataggcatccacttttatacatatatatgtactgagaacttgccaaattcagggcttggaactagggtgttagaaatgtaaaaataagctagtaatataaaaatataaaaataagtggagtagttaagctcaattgacaaaaacctgtagtttaggtagaaggtgattataagagtacaaataaagtattccaagggttcagaatagaaaatgatttcttccagcttggggacatttgggaaattgggatatcctttggggaaatgtagtaatcagtatattctgggaaaacatagtagagaatgaataaataaattccattgaatttggaatatgttgtccattctccctgtaactaatgctatcaagataaagtagaaataccacatttcagaaacagctggagtagacaggtcttcataggctagcttggaaacctaatagctattaataatgaaattttaattatactctggattctaaacaatgaacacacagtgatctttttgacttgctgcttgtttataagttggggatggtctgaattcattgttgattcaaaagaaaacgaatagtgttttaaaccttttatttacagagactataatttgtcaccttcctaccaacatatcttaaatacaccaagaccttttacagaagcttaaacaagggtgtacagctcttgttttactcctctcccaccaatctgctttagcttatctggactttggtatgtaatttggaaattgggctatgttttcctcacttaaattgcaaaaaaaaaaaaatgattaactgaaataacactgcacattattcagatttaattatgtttgtaatacatcacccagtgatatggggcaactttttgctgttcactttccatcatgcatttctcataacatatggtcctcatgaaatagttttgattcagagtccccagtagcatatggcaaaaaaaaggcccctcaagtcacatgcaaagtagaggctagcctctgtgccccagaggaggctccattgactgcaagccagcaagcctggaatctgaattggtgtcagggtcccactcatcatgaagattttacatttggtttgggactttggagcatgaggctctggatgtaaaagtcagaagagatatggcttttgtaatgtctgcagagattcctgtgtcgataaggtcagcagaaagttaatagatttttatcttctcatcacatgaacttaatatagtgcaactgtttggtgcgggtgagatggcgtaatgggatgagaatcccatcacgcgtctcagatttttcacaaaggatgttttaggtctgtaagtgcatttttgcttaaggctaaaaaaatctattactcatttacataataaaactgttaaataaaaactttaaatgctgtgcaacaactctggctaaaaacaattttagtcagagcagaacatgtttttttcctttgtgcaggttattcaattacatatgagtaagaaaagcttgcatttatcgtactttaacagaacgtgagccagttcaacttaaatgcctttaagcaaatgctcagagccataaggcagttccattaggactgcttcatccttacaccagactcttaataactgccgtgtgcctgccctgaagggaaggtccttttgccaggcactggtacatgactggaaacacaaatggagggaggatggtatgtgtgaatcctgccaccaagactcgctttaggaggggatgtggggaaatgtggaagaaaaaacaccaggctgactccagatgccacctttgaaaatctctaggtcatattactttcaaaccaacctactgactcgagatctgctttcaaggccactctgatcagctgcccgaattggctgtgagggtggtttctgcaaactagggatgctcataggggtatgcaggaaagctgggaggctgaaatgcaaggaaacccatggagggacagcaccaggtcagactgactagcaggcctcagcgatcaaacacgtcacacctgtcttggccactggtgcaggtgttctaggtcagctctcactgtggttatcaatcgctgacagttgacagtttaattttacaccacaagtacctcattacttgtgtaggcacttgaagaacatgtgggcactggatcggatcagtgatcaatgacaaaggttgcatagggtgcaagtggtagcagtaaaagtgaaggtctccgtgcatgagttggcagtggtagggatacatgacaaggggagtttaactgacaaacagtctgtcaggttgaaaagaatggagatttgccagagagctggctgtagattataaaatatatctcttgatttcaggggaaggaagaggggataaaaccccaccccaagcagagccttccattcttgaaagcgcttacgcaaatttaatgaatgtgtgggatagtaaatttttattctacgagtgtttatctcatgacatagacgcattcaggtgtgtagggatttaagattatagcaggattcagtaatgctatttcataaagggtgtgtgtttgtacgtgtgtgcacacatcacaccaactttaccaaaccagacccattgctgttttagattgttccatgccagcttattatggatattcaataacaagaaagtcattccacgtgagtccttctattcttaccaatacgatttgtggtcaacaccaccaaaattgattgttttatagtggtaggagaaaaataaattttttcaagtatcttttgtagtggtattttaataaattccttgcaatttccctctcccctcaactttttattttctaaaaaggagtttctgactttttttcttacacaaatatttctgctggtgttgttattttatgaagagacattggctttaagaaaaaagccacatggcatgagttttatttcatattatgtgctttgtctgttggagtaagactcattaggcacactgtacatagcgtggtagaaggaagatggatatcgagacaaaaaaacctgagtttgaattctaccttggccacttcctgctgtggcgcttgggagaattattaacagcttcaagtgtgttgttcatttataaagatattatattgcctccgtaagtatctaaaaaattaaaactttttttaaagtattataatacaggattgtggaaagagttcaatgaggttaaaatggcggagactccaaattttctcccaatatctattccccttctctgtccttttaataacactacgacttgagctatactgaggcatatggctattcagttataggctacatttctagcctcccttggaggaagacatgatcatgccattaggattctgttcaatagaatgtgaacagaattatgtttaaattatctgcaatttataaaaagaagcttcctgtccaccttcccctcttttctcccttcctgcaggtgggaaagtagatggatggtagtgagtcagctctgaccatatggaggagaacaataccctaggagatggcagagcaataagcgaggaggaatctggaaccctgaatgttcttgcagagcagagcttcctacctgtctgggactgcctgcctaacttgggactgttatacaaaaaagaaagacatttctttcctgtttaagccactgtactttgcggtggttttgtttcagcagcttagtctgtatgctaactagtagatctaatacttgtaaaacaccaaacataggctggcacatagaagcacaccaacacgtttatcatttaaaacactgggtatcatttaatttctttcatttctttttctttttttttttttttgagacgaagacttgccctgtcacaggctgaagtgcaggtgtgatcttggcttgctgcaaactccgcctcctgagttcaagcgattctcctgtctcagcctcccgagtagctgggattacaagcatgcaccaccacacctggctaattttttgtacttttagtagaaatgtggtttcactatgttggctaggctggtcttgaactcctgatctcagatgatacacccgcctcagcctcccaaagtgttgggattacaggcgtgagccaccgcacctggcctcttttaatttctaatcaaagtagtggataccacttggaatatttaaatattaaccataaggcatctgggctaggttaaataatcattctttccttccactcctaaactggtcctaccagtcaactttcacctgcttggaaaatgatcacattttcaggttctggtttctttacagagtcatctctctcattctgtctatgatatttcactcaagattcagaggtataaataaacttcactttacctcacagcatcaaatgcgttacatcatttatgaaaactagtttaccatgattacttaccacatgatatccatggcttctgtttaaaaaagttgggtaaactttaagattaatgataatctctgggaaaagacacatagggttccagagcatcaatcaatacattgatgatttagcctataggcaactcagggcaacctagataggttcttagtggtactgcatcctcacctgatcacacgacattcttttcactcttctcttccttcaccatcacctcctgccttccagtgggactctttctgtcttgcttagtcttgtcgtctagcacagaccggcaccctccagcattgtctagttttcactgtagcacacagggctaacagggttactgttactcatttctgtgatacagacaaaattttgtcacttaatctcttttcttccagagttaatgtctattacccctgtgcctacagaaaaaagagtaagagctagcatgtgtctgagtttaaaaatatataactctacttttttcctttgtgtagttttcctttagtttgaataaagcttaagggacatggcagctaccatgaaatagctgaaagtgtttgtttttcagaggtggatctaaacttgttctgtccagtgctcaaggcaatgtctactggctggcagttacttgggaggcagtatatatcatcttctttccttaaatggtacctttgtgtctaggaatccgagagccaggttatttttttcggcatttctgcaattgactaaacctcccactcagagttttctgaccttccatccgtataatgttgcctctgggaatttgtatgtgtttcttaatggtatctataaacaaagaccagcatttctactcttgccctttagataatatcaagcagaaagagatactaatttcattctgtcttaaataggattcatgctgcgatgggtatgaagacatgtgaggaaaagggaaaaatgagatacccccaagaatactgtttctacaagctcaatgtccaacagcttcattttctgttgtcatgtgcccacttttagggatgggaggtttttctgttctctgtcaacttcctctagagggcagctcatggaaggatgccctgcaagtccctcttgagtttcttaagatgttttggggccctttcagagggcagctcttctgggagactgcctcttggtagccctggggaagtaagtccttggtcccactcctggggtttggagaggacagctgggtccctgacacttcctgggctccctgtgtcttcagctgtctgaccccatgatctcccagctcttccctgcacaagtccagtcctccagtctagttttctgcctagctgcttccacagggctcaggggtacaaatgcaaagtagtcccagccagagtctttcttccagcccatcattaacaagggcatgggccagtcacttaatctctctacacctcaggtttctcgtctgtgaaatgagaagcatgaactaaattggtggttttcaaattgtactcctcggcatcccctcaggggagctagtgagtatgtgtatgtgaatgagagaaggagggagggagggagagagagagagaaagagagagagggagggagggagagagagagagagagagatttctctctcttttgtatatttaaatcaaagctcagttaatttaaactgccttgcaggtaaatctttctcatgcttacacacaaatactcattaatacttttctctttctagctgctcccctccactccgtatcatttttctttctctaagggaaattttcgcttagagaaaaaggcaattacacaaacttccttagaaactttaaaaactgtccctaaagaatccagggctcctaactgccaaagatcttagagtgccaaaaagcttcttcagactctctacagagtctctgtcagtctgataaatctagtaaaaatgacattttcttaagttttgagataagcaaacacagtcatgcatagttatgacaggggtatgtttgggaatgctttctgagaaacgtggcattagacaatgccattgttgtgggtacatcattgagtgtacttacccaaaccttaatttagcctattgcacattgaagccgtatggtgtaccctgttgctcctaggctacaaacctgtacagcatgttactgtactgaataccataggcaattgcataacatagaaaatgtatagtaaaaatacagtgtaaaagaaaaaatggtacacctgtatagaacacttgctacccatggagcttgcaggactggaagttgctctgggtgagttagtgcatgaatggtgagtgaatgtgaaagccctggactttgcagtacactgctgcagactttataaacactgtacactttagactacactaaatgtatacaaaaatttttctttcttgaataataaattaatcttagcgtatggtaatttttttttactttgtaaactttttaaactttgactcctgtgctaacagcttaaacatacattgtacaactgtacaaaaatattttttatatccttaccttataagcttttgtctatttaaaaaattttaaaaaactttaaaaactttcttttaaaaactaggacacacacacattagcctaggcctacgcagggtcaggatcatcaagatgtcacttaagtgacagacatttttcagctctgttataatcttatgggaccattgttttatatgtggcccattgttgaccaaaacctcatgatgtgatgtgtgactgtatataatttgttattcaatatttatttttcatggtatttaattactgatattacaataatatattccctgtaagttaaatatgtgtgtatgtggtatttgtctatgtgcatatatgagtgaatatatgtattgggggctagcctgtgaacttattcaccacatataataaacatttctatggagaaaattggtggtatgtttctaacgagcatttcaaaactttcagaacatagtttttttgtaagttgcaatcttgtggattactttcatagctctgcagctcatgagtgattggggaagggaggactctgtggggtctggaaactccctatgccttcagatttattttaaatgttatttattttttctttttgactaaatatttccttcctcttttggtatacgtcagaagtcctcaaccagagatgatttttctccctggggtaaagttggcaatgtctggagacatttttggttgtcacaaggagtaggcagcctctagtgggttgtgctattggcatctagtgaatagaagccagggatgctgttaaacatcctacaatcaggacagctcccaacaaagaatcgcctgggccaaaatgccaatagtgctgaggttgagaaatctgatattggtggataaaggagtcaggtccctgactagccagtgagaaggggtataaaaatactatttgagcataaaggctcctttcccccgattccagcctctcttcttgtattatttccataatttagatttaggtggttaaggctatctggaaaagttagtcatttgctagctgacgaatagagaacatctctctaagttcataatctttggaaagttggctgctggctactcattgtgtaaaggtgccatatccatctaccaaatatcagatacataagtttttttacttaaaccaccattcaaatcagagtatatctctgtttctaatgttctgagtttgaagttgtgtgtttattgatcaagaacaatatttaggacactagtatgcattagcatactaattcttctttccccatacgtggtaattaatgggttcctcttcttgaagggggatggtatttataggaaagtgcaaatttcatttcatttattgtcagcagtggatttttcttttgaggctcatgaccaatcatggataaaattagaaacagatggaaaagttgcccttgtcaataaatatagcagcattgcagggtatttttaacctttaacctacatgtagaatattatcaattaaattttggaatttgtgcagttttaatcagtgttacttgtgtcttttgcatagttgcaatttagaaagtttatgtgattctttcttttgggatggggcacattttcatgtcttctaagtgtgacgtgagcctgcagatggaaggttgttctgtgaatagggggaatcttgtcaattcacaggttcagagagaacacctttttcctcagcagctgaactcagccatgcatggtgagagagtttagcagtaaagctaccttgtttcaaggtgtttttctactgcggcgcaggaccatccttctggaactcaatggtgctgtaccatccaacattcccatgtaagaggcctggtgagttacactcagtgctctattccttgtgggaatgaggcatgcctggctttgacatctctgctgccttcctcttttataaaccccaaaaggtgttagagatgctgtggagaatagttttcatattcggcagaacctccaggttcttcttttccccctggttctgaaagaaatgatttttaagccttaacctactcatcaactcagttccttgctgagatttgccctggactatttttaagctgggagttggcacagggaaaaggcttataaaactatgaggttggtttgaatttgggtttgtggcgacacctaagtgtaggtgccttaccacctggcttttagcttcattctaagagtcttcctggctttcatggtacatgtaattttgaccacaaataactttagagaagtctaatgctggagcgattattgcataaatctccagatgtagaaatggagtttttgaagtttgattgcatattcctagctgcagtcctaggatcttgaaccactgaatgaaaatattgcaaaagaatgctttaaaacggaagtcctgtggagtgtttctcaggctggcctttctactctactttccaaatgaagaaaataattagtctttttactttattcaaacatttagccattgtgtcttggagctcagccaaaaataatcacctgaaattttgtttatgatttattcacaaaagtggccatactttttaaaggagagcaaaaagagaacattttaagaatgtgtgagctcattatgagcccaatatgttttaaaaacattcaacttgtaaactcctgaaatgcggtttataatggaaacaccagccgagtttcctggagtgggcctgagtctaccaatttctaagccttttgcagacctagttcctcttgaagggagaaaattaatcatggcccctgggtaactggtgtttcttgtttttggacatctaaatgatacttagcacattttagggatacgtgtgcatgtgaattatttgtagatatagtgcctacttttctaccttcctattatatatttaaactctgttttcttgagaaaactatgggtgactaattcttgactttctctatttttgcttagttttttaatcccttggggagtacttataatttgctatgattttatgttaatctcagtttaaaaaatttataagtaatggctgggcacggtggctcatgcctgtaatcctagtactttgggaggctgaggtgggcagatcacatgaggtcaggagttcaagaccagcctggccaacatggtgaaaacttgcttctactaaaaatacaaaaattagctgggtgtggtggcacacacagctaatcccagctactcgggtggctgaggcacgagaatggcttgagtccaggaagtggaggttgcagtgagctgaaattgcaccactgcactccagcctgggggacagagcgaggccctgtctcagaaaaaaaaaagtaagtcaagaggtagttgtgcagaatattacatatatccatacataaatcttcaactggcatagtgttaattatgacttccttttaactggcaggttcctacatctagaagacaaaggaaattataatgatgtacagtctttgaaattcctgaatatctctttgaatgatcagggaattaatcaacatatttatcatgttgtggtgttgagtgtatttgattctttcccttttattctttctctttttgcaaattgctaatttatgtgtagtatagcacttggtcaacaaagccatttctcaaccattcccagtgagagaattgattgttggtacaatggaacatcttcacaaagcttatattgggaaccagcttattcttgtctaaaagttaaatgtatcatagcagactttcactatgtagtttttccatatacaggtttacactttttttttttttttttttgagacagagtctcactctgtcgccaggttggagtgcagtggcttgatcttggctcactgcaacctccgcctcctgggttcaagtgattctcctgctcagcctcccgagtagctgggactataggcatgcgccaccacgcccagctgatttttgtattttaagtagagatggggtttcaccatgttggccagaatggttttgatctcttgacctcgtgatctgcccgcctcggccttccaaagtgctgggattacaggcatgagccaccgtgcccggccttatgctaaaggggacacactttaaactgtggctcacgttaatgcgtatagggttcttcgctatcggttgtagctcacttcagtttactttagtttggtaaaattacatttaaggtgtgaggatgaggtttaacgttttatcaaaaccctgaatgatggaagcagagtggtatgaatgaatatgtctgttttgatcaggtacaggcccagtgcaagcatttagtgtagtttgtttctaaagctacatgtgtcatatcaataacaattctattaggcagtcacatatcatattcattaaggtcacagtctgacctgtgatgtttccaaagtttctctcttctctttcctttgaccttcatggttttgatgcctagtcccatattttcttcttcactctggcctcatttggatccatttttgtctcctgttttcttaagacccttctctttgctagctgatctgatctagcaactcatgatgataataacgtcaacagataatacctattaagagtttatatgcaccaactgcggtgcaaattgctcactatactacactcagacgaaaagtatcattacccccctttatgaatgaagtaaatctacagatcaggatcccatggctagttcaaggtggcggtagaattgaaaaccaggcttctgtctctgacatcatgctgtttccattacaccacagaatttagcactacaaaaaatagttactggaagactttgttctgctatcttcttacattttaattccacagtaaaccctcccaccctattttcttttggttcttgtatgagattgaatcttttttgtatgttttattggcagatgtatatttttgaaaaattttcagccagttttataacttgctgtttatttcatatgatggaaattacagctgcgaagatgccattttaagataaaattgcatctaatgctaatttaaaattggcacctggttttaaagtttatttaaggacattgcttgtttattggatacctttaaacacttaaattattttcagattgatagcagggcagttggaaatggtgaaggagaaaaatgaattttttgtacccttattatgaatcttttaatattttcatcctggtaaaacttatgaggcagctctattttgaagatccagaaaggttgatatactgggtgtttttctcttatttattatggtttcctgtaggggcaaaagcttggacaactctccctaacgctggaagtgccaattatctgatgtgtttacttgatttacagcctaagtttttgtagatatcctgaatttgaataaacagtggaccaccatccatgtttagtgtgtatttctctatttgaaattgtctctgtatgacaccagtcttcctttaataataacaggctcctatttcattattctgggacaggaacctcaggatattaggccttgtgtgttgatactccctcatgagctgttttgccacttcaccaagaactcaaaatcagagcccctgccaaccagaggtatcaaggtttgtgaggcaggttaaatcacccagagtggtcaaatgtctgaggacctagtctaagactactgatgcaatttgaaattgtagtctgtgtatctgcttattatattttttgaaagaaaaaaacccaacatgattttttaaagacatctgctcatctgctctgtgcccattctgatattggctgaatatgatgctcttgcatttagcattgttctttctgcaggccccataagtcaaagttctccacgggtcctgtgtacaaggctggggctgtctatgttggttttcctgagcagctttccgtcacctccctggtgttgttgcacaaagactcttttgtctgacaatattggactcttctcaaaatctaagcactttcaggaaaagacttggaagtctatcttctcagtttccacacctcttcgccctctgagctgtcatttagtatgactggttgttagactctccacccggctccttattcagtttattagtggattgcattattactgtacctatttttaaaacttatgttgaacatctcttaatgtatccctgtcttctattttacttcatcttacactttgataagattgagattttaggtgatgttacttttccatgtcaggctgaagttcagtgagatatttaatctttcctataccctagcttggaaacatgcacctcttcacctccttccaacccctcaactccccataaaactttcattgtcctaagaaactttttctttttaaaccagcaagatttgatacactctatttgaataagaaaaaaatgctaatgtgtttgactagtccaatttatattcataaaatatagtcacaaaagaagaggcatttcattaaactaaggtatttgtaactataagatatttatattggggaggttgtatttaatatcagaatacactgaggtcatttatatttgttgctaactggaaacactaattctatggaacagtcttttttttttagttttaatgttttttaggttttaatttttgatcaaacagcattttaattgttactgtgctgtatggtgagcggtaaactgcttgcatttattttctggtctgtgtacagtcatggaaataaggatttagtgtctctgtaatgtgtacattgtgatataatcacttgtacgcaaaatagatttccttcatatgcattttgaggacactttacccattatgaattctgctgaaaacagtttttcaggtagagatgcaattatatggtggtctacaaggaggaactaaccaaggatttcaattaataatgtactttcagccctcagagatattacgtttgcccgatcaagggttatccatcaccgcctgggctacagctgtcttccttctcttgtttcatgttctgtgaatgtgctcatccaatatgccccaggacagaaagctcttggcacaagagtttacatctaagtgttttcttctaaggccagtgacagtttctgaagatgaaacttgcacatctctcggaagtataatattaaagagttacatgtaacatttcaatgaattaaataaactacaccttttgagaaaatggagaagttgtcaataatattttccatccaattattcagttaggatgtctagaatccctcaaataacattatattttcaattagctagtttatcgattcatcttgtattatttttcaaaacagaaaaatataaacattattcttattattggtgtgctagtgtctgattgaaattgactatatgaatgaaagaattctatttttgtatttggatttgatgttttttcttcaatgtgccaaaagttatttaaaataatgtctactttaaaaaatactacctctctggttttggtatttgtgtttcatattgaagaatggagtccccacagtatacgtatcctatagccaagtaactgcatttatattgttataaatttttgaggttggaatctcaagtttttaaattaaataactacagttaactgtattaagtgtaaggttgaatttgatcaaaaataagaaaagcatttatgacaacccctgtaaatgtttaaatactttagttgtgtttgtgagcattaaattgtattataagaagccaacactgagtatactggttcctctgggacacatttgacttttgggagataaaaaaatcttgcattaatgaaattctgcaagtttttgatttagtagacaatgtttccagtatatatgaagcaattttaaagtgtatatgtgtataattacttgtagaaactgtttaactttaatggggcatttctcgatcacataataggaaaactaacagctttaattaagatttatgaagcatagaggtaatatattctgctaaattaggtagtcgttggtgggtagtatgcttttagagatgaattttctacgtatacttcacttccttgtgcattttgggtttagaaaggtaatttgtaacattaaatccctgtatccattagtagacaaaagtaagctttgttttctttttaaacttttaattaataataataatttagtaatgggcagataccattaagcatttctttaatcactgatttcaggtcatagccacatgagcctgtcttgaagaaaataaagaaaattcaccattttattcaagcaactggttaatttgaaattgagtgcttagaaactggttgtaggacttaaatcaaccaattcacttaaaagaaacagttctcactaaattaaatcagtccagccctccctcccccattaattttagaatatagatccagttttttttttgtttttttttttttcagttagatccagcttttaaggtcagattctgtgacgtttatttgtgttccatactaggcctgctgtgttgccttgttgttttaacatgttggtaagcttatcaattgatattcagagagtatcaactttgagactcaggataagctttgttatgaaagccagctgtgtgaaatgcctgcagatggactagtgggagcggatgggcctggatctcccttgctcagcctgccattcacctcttcccatttccccaagcagaggaggctcagacttgagaaggactaatggaaactcctcttctcccagtattccttcagggtagtggttgtcgaactgtagcctgtatcggaatcacccaatgggtctattaagccagaatgctggccctgccccctggaatttctgattctgcaggtctgagctggggcctaagaatttgactttctaggtgatgctgatactgctagtccagggactacattgtgagggccactgctttagggacaagaactctaagttaaaagaaaaaaaattagaagaatgccacagctctagatagacatagaaaattgagaataggtcattttcacaatgccacatgtgcttctgtttttctttatgcttagagcaaagggtcagctagttttaagagagcattgtttttttggtggagggccttgaggtacttaggtgaaaaggtgttttttttttttttttttttttgtggtggtggtggtgttgtcgttgagatggagtctcactctgttgcccaggctggagtgcagctggagtgcagtggtgcaatctcggctcactgcaacctctgcctcctgggtccaagcaattctcctgcctcagcctcctgagtagctgggactacaggcgtgcaccaccacacccggctaatttttttgtgtttttagtagagacaaggtttcactatgttgaccaagctgatctcaaactcctgacctcaggtgatctgcctgctttggtgtcccagagtgccaggattacaggtgtgagccactgtgcctggtagaaaagtggttttttgaatgaagaataagcaaatgaaattggaccacttggtttagccttatgagcaatgactgtctttgaattaactccttgggaatggggatctcaagtccagcagcatctgcctagtcttttatatctttctcattgtcagcttgatatagggtagagccagtggttctcagctgtggtgtgcagagaatcattgtgggactccgtggaaatatagattcctggaccttacctggagattcagattagatagctctcagatagcattgaggaatctgaatttttatcaataacactgaaggagattcacatgctaatatgtcatgggccatagtgagctacatatatagacaatctgcactgtatagggtatatttgcctcaggaacccctaatggttcctctattgggaaattttctccatcagcgttcttgtctagctgtaatatttatgctgttttcctgtggaatttagtttgttagctccttctcataccttgctttctaccaagtgtagtcttgaaaaaattaatttccctgagtttgatttttcccatctacagacagcatgcaggatgaggctacaacatttctgcgtttgttttcctagtgttaatactctattaacccagccaagctgggtgcagtcttgcaggcctgtagtcccagcttctgaggaggctgaggccagaggatcacttgagcccaggattttcagactagcctgggcaacatagcgagaccccttctcaataggaatttaattcttaaaaaattctatcagcatttagtaaacaatcagtaaacaaacaaatgaataataaatgaaggcatatgtatctcatgttttatacatacatatatgtcttagatatataaacatacaccgtattttttatgtacatatatatcccatgatgtgtgtgtaaatacatatcatgcctacatatcatgtatagatttataagtatgtatccatgtgtatatgtgtatgtgtgtatgtgtgtctgtaatgtaatacatgtaattgtggaaaatgctggcagctgtttggctttaagtgccctaattgagatggagggcatggcaagggactctaagatgtggacttttaatccagatgaaaagatgagactatcatataaaaaacaactagagaaattgaacttcatgattctgtgccctacgtggaaagaattctagaatttcagggcagagagaagctcatgtgcttggataaaagttacccagtaaaggctggacctaaactgggcattgggcaaggatttaggggaactagagaggagagggcggtggacaccccagagggtagaggagaaggctggaaggaaaggataaacacaacccagttgggcagggtgggcgtgagggcagtaagaggaggtggaggctgtctgtgaaagggtgaggaaaataatgttggccaagtaggctgcagttggctgaggaataatgtgaaagtcagaaaggaagaggccttctggactggaggcagccacatccgtctttaggagttgtggacagcacagtgctgatgcccagatttttgctggtgagccagcaagtttttgtgaacagcagacaccctggaatttttaatctagtgttttgtttgggtttctagtggtgtgtttgggaattatttgggtttgtttctggcagtgtgactctgaagtttgcattgtgagggatgaagagcgagactggttgaagggtaactgctggtcgggggtagaacaaaatctctgagtcacagtcactcagctttctgtgttctctccttctgaaagtgtaaacagccacatcatttcagtttggtttctagaaaatgaagatgaaatgggtggggaccagaaaaaacaacagcattgattttatgagtatttttttatggaaaattattctctatactgtactgttgttatgggccatctcctaggatgtaaaaagtgcttgttttcaatggaattttccttttaggaaagaattttatcatattgttgccggagagcatgctatttgacctgtggttctgaatctttgtaataaggtactctacatattataacaggtttctctttcattttgtttgtttttagtatgagattgtctctcaaatccacacattgttatattgggtcattcaagtgaaataggtgattagcacgggttaatggctgtatgtcataatagtgtgacatagcagacagagtgtgggctttggactcagacagaagaggccattcactgctctgtcttacaagtatgtgggtgtgtaacatggagcaaaaaaccaaagagaaataaaccctaagtatcatttgctaaacggtgcacttggctttctctctcggcttggtgcatccgactctcgactctccaatcattccagggatttctccgtccacagcctacaaaataacagcagaaggttacctttggttttacaaagccaacatttccttgaatcagagaatgactaaacccacattataacttaggagtaatataaagtttactactttgttgatttaagtataattacatgtacaaagatataaatgatgtacaaaaggattctgttattgattcccagttctcctccactaataagcgagagggctgagaggattgccacagtcctggtagggtctggagttttctattctcgatgaggtagtgttccatgtcattcttgtactgtgcctttccataggatcaagttggcatccttgtttctgatgacttgctagcagaaaactccccatctggcttaggaatttgctcaatttcactttgattagggaatctccatcaattctaaagcagattgctttctctaataggttctgcagaaggcctgctactagttgtccttgcttgcgttttgcattatgctgtgctggtagggacgctttctattttgctgtctttagtacagatagtaacttctagattagtatcttagctaaaactgatttcacatgatcacttccagtttaatacttgttaaatattttatctagctgcagcagcttaataatcttaatgtacaattatttcacatccaccatcaagtggcagtgcgtggactttaaaaatcccaaggttttcattatgtaatggggaaaaagtgagaatcacactgttgatttgttgagaaggttaaatgaaatatgcatatagaagtacctagcatggtgcctgacatacaacagagattttaaaaatacatcctcctttgtacctatgtgacaggcctgaattttcgagaaaaggattttattcttattctggttctccatttctagtcttaacaaattggcctctgacaaccatttagagaagaacattctgcactggccattcctctgtgggagcagattttgccaggtatgctcatgtatcggtgtgggcactctgattctaaggtagagcaaataacccaaaatatctcttgctgttgctattgttgctattatacctattttagcttccttagtcatcttattcatcttggtatttacctcatgcctataagagcaggcttcccaacttcatacttattcatcaaatcagtagatattttcccccagagatgtagcatgttagaaaaataaattggtaaaaactaatgcttacttagagtttgttttcccttcttgtttatagaaatccaaaacaaaaacaaactccacctgaacttgttgatgatctgttgttttcctgcctcttgtccagatgtggaacaaaatggaaggcatgtggagattcatagttctgagtccaaagatgccaagaaagggtagtgctgaataaaagggaaagtgaagacagaatgcctgaattttaaagggtcttgcaagttggctcaattggtgtcttttgtgacaaaattgttgcagtgattccaagggaatcagccttagaaacactaatttttcttcagaaattgcatgtgatttgaacacagatttgttaaaagtaggtagatggatgtataggtttgtaggcagatagatagatttttctatgtgagtcggaattgcagtgtggcgatgaagatgagaaataacttgcttctactaatgcaagtgaggccaggttaagcccagagcttgctgtatggactagctgttcagcaataaatcagtgggggttggggaggggagacagtggggaatagcatgccatattacatggcataagagaaaatcataaaatgccagagctgaggggtcattagagaatgttttttccatccacatcattttacaaatgaggaaacagaggccctgagaggtggcatggacttcctaggacctgcagttacctataaagtttaaagtagaatctactctaacatggtgccttcctggtctctagagaggcgtagggatatgggatggccgaatttggcctattgtcaatctatgaaattttcagttacttcttagagataagaatagtggtgtcattcacccttctagctcttatgctgcaaagccttgtgtctctgtgggaagcggacagcctaggttaatatcctggggccttcttctccatcttcatttaatattgagtaatagggaaaattagcaacaggttaataattcggagtttatttctttccctaagacttggagagttgggagggaaaaaagagggccatttgcattgggaattttcagaagctaccacacagccatttgagtagggtttactttctgaattttctgagttgagagcacaaggtatggtagacttaaaaatatagatatggaatagtcatacttcccagccctctaattggacatggtggttcttgaagacaagaaaaaaaccctatgtatttcatttacctaaaagatttccaaatttacttttccgtaggagatgtagtacattttcatattctgagagtccagtgcttttaaattaaaaaaaaacccaattcatacatatatatcaaagaacagcttctttgagttaaatccttgcttgccaatgtgtccttttatgagatagggtcatttgtcatgagggaaagcaggattaattaactgtggaaaacgtacgaagtgtggaaactgtgagttctaaaatgtttccacattaaaacacgggaaaagaagcatagatgaacgtagacatcagtatgacttttttcttcagaaggcttaaaaaaaaatctctccatcacacaaatgaaacaacctattatacacagtcttcccatatgtctgacgcagaaacaaatgaggaatgtactttatttccacataaattgtgtggtttcaaaattcagttcccttcacccctgaattctggccaccatgtcacttatatgtctaacaggatgacagaacttttaatgggacgaattgtagaaggggagaaccacataatattgtagctcatgaaagtatcaaaacaaaacaaaataaaagtcacccacaaaaatctctatggcaaaataaaaaagaattccaaaaggagttgccaaagaaaggtatataagtcacggcagccttggggaagtcatcatctatagccagcaagtcactttatgttcttattttgttatttactctgttgtttgataaaatgagtgcttacattgaatactgtaatattatacagaagatatagaaactactttgaagatgaaagatactctacatatccaggtctctctttatgtaattttattttgcttaatacaaataataaagattctgtttacttataattttcttctggtttctgatgacaatatggtaaacaattttaattattatggtaattaaattaacaaattaatttggaactgtatggagtttatgcatatttctggctaattctggatctgatccttaaggccaggatttaattttggataaagggattcatttaaatttggtattttttttttcctggcaggtgaataatagaactttgtaaacaaatagaaaagtgcattttaaaagataaaagacatggagacgcaactggaaactctttgttccatgaagcattaggctatgacagtgtacaatgtaactgtttgcagttaaatcaatacacctttagagtagcattggaaactatcttttgtccttaccaggttcctcctaaatattttataggttctagcattactttgcatggttccggtacaggatattaaaacgtaaaaaattagatccaacaatatttgcatctcccctcccttttttttctacaaggtgtcaaataactggtttgactgatttccccagctttcactgaccagttgtttgagttggcccattcaacaggtgattgtttatgtgtgtgtgtgtgtgtgtgtgtgtgtgtgtgtgtgtgtgtgtgtgttggcgtgtgggtttacatgtgataaagagccacagtccctttgacagaaaccatgccatatgtgccaatggcaaaaaatgttactgttctcttaaaactcattgttttaggaaagagatgtgattatcagaaatatttggtgacagctccaggctttttgataaatgttgctgaatcaaaatacagtatgatcatttctgtattacaggaaatattgggcagtgaaagcattgtgaagtgtctggcaaaaaaattagatgctcaataaatattggttggaatgctgaccccaccttttattaggtatacatctttgggcaattatttaacctctttttgttgtccaagttcccgcatctggaaaggtggggataataactgcactgctgttattaggttattatgaaagttaaatgagttagtacatgtaaggtgcttagaacaggaactggcacatagtcctcaataaatgtgacttaatattaccagtactatgattacttcttctacgattactacagatatgccagcactaactgctgatacctagtaagtggaaagctatttctaaaagctgctgcgcagagaacattaccagatggttatgctttaagaactgaccaaactgaataatttcacttgtgtatctggtcagactgagctttggtgtaaggtagacatagagatctattaaaacaaacaaacagaattcagtctcctgtctgggtaagtgaagaatctaaattgaaattatatattcctaggggatgttacaaaggcaaatgctttctttgggatctagtgaaacacaaatacatacccatataacactaaactgacaaatggtaaattaaaacttttttgcgaatatattattctttaagccaaatttcattagcctgagccttaatatcagtgatcacctattccttaaggacggttgtgaaaattaatgttggtaaagggtttccagaggtacaatagccatgcaaaatagtattgttatttatattacattgcaaatctatgcccaaggcaataaagaaattatgctaactagacagcaaactattacagttgttggctttagatgcttaaaatataaaggtatgggaaaagtaaagatggaaatttgaatgcagagtgtggtttataatgtaaaaaaatttaaactaaatagtatattcataaccttctatggtttttatgtgtttcccctatgggagcaagtattctcattcctactttacttgcaaagaaatggataggaaaatgtagatttaaaaccacttattgattagacaactatttgaagttttgaaatgaaaatataaaaaatagaaattgagttaattattctgcataagactgttgatcttaaatgttttctctgttttgaaatacagggtgcaattttgtggttgtagagtcttgcataggaatatgatagggagaaggaagacaaaaatgttagaattaatatggatttgcctcccaggatacagaaccacctgctaagaatgttcttaacatttttttctgtttgggagatttaaaaaacttgttattcctaaatagccctcaagaagtgtattgaatggcaatcattcatttattcattcactcattcaaccagtatttattaagtgttgactatataccagaaactgttacaggtgctattagtgaacaaagcagataaaactccctaccctcatgaagatgcagcttttaagaagggatgggtaggaatatttaaaatagttaacaacctctgcggtccaggcagcaaaccagtctgacagggcatggacaggtataaccttataggtgtctatagacctggtaataatacctggttcttggccctggtgttagggactttgggtgggttggtgaggtagaggcgaaatgaggagaaatatacatctcttgccttcaagaagcttatggtttaataaaggaaatgagccaaatacacacataattaaaatacaaaatagaacttccacaaacttttatttttatagaattattttctctggagttttagagaaattaaatgctacacttatattgtatcatcatctcttcaatccttaaatcttcgattcagcactattcaattgcctgtcccattcccctgcattaaacttcagaggtaatgacatcaatctctgggataatagaaccatacatttggtaatgattcagtgtttggcctccaggcaggtaaagacacaaaccatttaagacagatggtcattgctcctattttaaaaagatttctaagacctctaatccataacctctattggtcatcttgtccaatatttaaaaatgttcttatatttattactgtcaagaagattttctttatgttctatccattttcccatttcatcttgcttgataatctgtggaaatgaaagacaactagtcagcatcattctcgtaagatcctttcgcacttgattcttgaacacttctagtgaaataactagaatttatattgtcttttccttttaggatctagttttcatcctcttagtactttttggtactgctcattttcagtgtcttcattctttaaaatgtgaatacagtgctgggcagcgtggaccactttatatatagtctttagcattattgattacagagaaaggatgatttctcagctgccaaatgtcatactcacttgttaagtcccactttctttagaaatacacagtagtttaccagtagtatactcaaattcaattggaaatgtactacaagtctaagtgtcctccttttgagccttcccagactttctctaactcattcttcattttcttctgtaatttttttttttttttttttgaggtggagtttcgctctttcgcccaggctggagtgcagcggcgccatctctgctcactgcaagctccacctcttgggttcacgccattctcctgcctcagcctcctgagtagctgggactacaggcgctcgccaccacgcccggctaattttttgtatttttagtagagacggggtttcaccgtgttagccaagatggtctctatctccagacctcgtgatccgcccgccccggcctcccaaagtgctgggattacaggagtgagcccccgcgcccggcctttcttctgtctttattaaacttcattttgtttcttaaaaaaacaactctttaatttaaaaaaatttgttctaatgtctattactgtcttttaatgttagctttggttcctagaatgagaatatcttctatgtctttatttcagtaacaataacaaaacttgcttatggactgaggagcctcattaagacaaataactgaaataatattctctcagcaggaattcatagagtaaatgcatgcatatttagaataattggggcttgcagtggccaggatttggccagttgtgacaaactgaaagtaaccacaattgatcaatttttgagaattaagctacggtaaatatttctcaaataattgattttaaaatatttactggctggacacggtggcttatgcctataatctcagcactttgggaagccaaggcaggagaattgcttaaacccgggagttcaagaccagcctgagcaacatagtgagacttcgtttcttaaaaaaaaaaaaaaaaaaattagccagacgtggtggcatgcttggatccaggaggtagaggctgtagtgagttctgtttgcatccaatctgggtgacacagtgagactctgtctcaaaaaacaaacaaacaaacaaaaaattaccaatcttcaactattatcaagtcatgattatgaacattaatccttagtttgtgcttttttagaagtagtaaatataggagtttgggttggcatgcactaatccaagcatttaagtggagatttggaatgtgatgggcagttctacaggaagagaaagagagagggagggaaagcgagagatagagggggagagagaggacaacatgtttcactttgttagttgtttggatttcaggtttttgggagtagaatgtacaaccccaacagatgcaatgcggttagtttatggagtctatgcatgttttatcctggattttcagtgttatcgagggatataagtagaattattattgatttctttatgtatgaatggtaggtgagaaatacttccttgaaaggcaggcacaaaagagagtattactactctgcctgctcattcattcattttagctactcatggtgtgccaggtactttgctagtactttgtaaaacaatcttttaatccttcattttgtgattgaagaaactgaggctcagtgagattaagacaatttcccaaggtcacagagcaactggagctggttcatttccaaacctcttgtacaatttcctctgtgccatgtaacctttcctttattcatttgttctatgtgtgtatatctgtaaatcatttgtatttctttttatttaagtttgggaacacatgatatttcgttttgtcgtatataccagtaagcaaaacaaagttccaaatagatgtgctgaaactgacaaatcataaagaaaaccctaagtgtttaaatcatgaatagtcagtcccacaggaggaaggctctaggaaggaacttgtacaatgtgcctcctcctggctgctgcttcctgacgcagctggtcaaatgtaatttcagaagttttgctaaaaccttctctgaaggtgtttttagctacaggtgaaaggatgaaacatcaggaactttggcagggttgtgcagagacaaaggaagggaaggattggccctagtgtgtgagctgtgagctgctattagcccagagttttgtttagtggatacttaacctgtgtgaggataaataatacacagtttgacaggataaactgaagtcaacatggtagcttcttcttttagggttctccctttaaaaattttcttctattccccattttctttaaccactctgcgttcattttcccgtttttccccatctccctctttttcctcctgttcctgtccttttgtgtttttggaccccaatccatgttgccctcttttttatttgttttatttcttctttctacatttattctctttttttcctttcttttatttagtcctttcctttctccctcccccacaacctccttatatttcttcttcatctactctcgcttgatattttctgcaaagcgctgcctgggccccttgacctcacaagaagctctctgacgaaacgcttaagaaaaacaaggtattatgcattatcctacacattctgcaatcgccctagcaatttagtaactacagtccaatttaaaccaggcctcaaggcaacaaaaattgcaccaaatgccaactaatttaccaaacttatagaaggaatatttgggagtctattcccttcaacccatctgattcatattattgactcatttagaaaacagaaagtgaacagagacaagtttttaaggagtttggtttcatgcaaatgacttgcaattgcagcccattatttttataccacgacttcattagtcatatccctgtcagacctgtgaccagtgtcaaatgttttcaaaaagcacaccaggacaggcatggaactcatcagcctgtgtcaaaggtcgctctcattaaggagtcaaaatgaaaactttcagtgtctctaacacatcgcatagctctccctggtactcccacccccagtcctgaaatccagggccagctaagcacctccagctccccagacattcaaataagatcaagatgacagggcaagaaaatgaatagagttcttacccggctggacctcataatctggtactgattgaaacaaccagaaagctgtttgccaggtcttatagcaccatttcctgaggttaaacataacatctcaaaatgaagcaattaggggtttctccaaaacaagagtcttcagtaattaaaaaagaaaaaaaaaggcagaaagcaagaaagaagaaaataaagactatcatggtaggagctgattaggcccattaggtagggtttgatggtggaggaactgcttttttttgccacctgggaggtcaacttttgattatggaagcagtaggtaaagaagaacttatcgataatagtgctataaagatggacattaaggaatctgaagatcagagataagaagaaaaccatctttcccaggactcatttggacaatatggaatatcagagattcggtgctccttttcttgtttcattttgttttgaatcattactgcttttctgaagacctgttcactatgtgagcatagcctctgtgttatgatgctataagggatttccaaagaggtctgagtgatggtttcttattttccttcagaatcttcttcaagccacattctggtgttggtgttggtgttggatttgggttcctaggagacttgaaacatggattacatcctgtcaccacaatatttggctggttacagtggctttaagattgatgaacagatatttccagtatcacgtggggtaaatgtcaaggaagcctctagttgtcaatacgacattttgcaaaaacaaaacaaaacaaaacacaatttaacaacaggaaatctcaaaatgtgatgactctatattgatttctagagaacacacaatctgctcttaaatttacaagtcatttggggcaacttgatttaattctgtggtaatgtctatgacttttctctctgcttacttactaacttaattaattactcacacttgaatgagagtctctcccagcctccatgagctgccttttcaggaaaatagatatcacacaaaagcatgttgcctcatacttgttttccagtatctgagttctaaacctttttgggcccaattttgattgtcttggtgcagggatactttgagggtaactggaggtgaatattttattttattcatttagttttagatatttgatatgtacctccacagtgagctaaaggaaaaaggatcaagactgtgagtagtctataaaaggcatcctggatattgtgatgtggcagtagcagtacccaaacactacacattgggtacagcgtaccctgctcgggtgatgggtccaccaaaatctcagaaatcatcactaaagaacgtattcatgtaaccaaacgtcatctgttcccccaaaacctattgaaattaaaaaaattgcatgccccaaactgaaagcattgttcgacgccaccatattctctctaaagtccattcgtcaatttctgcacttcaaaatatagacaaatagtctactaataaagtggcaagcctcccacactaaggatagtaccagctatttcctgtaaaatggaattctcatgctggacttcagggtaatatctttgcagattcctagcaggtgacgagttgctcacaatgggctctgtgctcagtgcttggctgagagggatacttcaaattaataattgggctcctacgaaaatcctctcctgaggtgcagaagatggatataaatgagatgaaatggttgtgctgtggaaatctcactcaaatgttgcatggcattcttttgtgtctcctgctctctctttaggctgctgttggcagatcagctagttgggatttcactgaaccttaacccgtgtataggtggtagaatatcatgttcagtccaagagaatcctgacattttcatttgggcccagctaggaagaattcaagggctttcacttatgaagagctactttgtgctttcttccctttttgggaggttaactataatgccttaccctttgggttctggggctcacccctttatacctgtggcctatcagtttcccagtggtaaagcatcatatccttgttgtgaatctgtgattgatgcccttggcctaggggctccctcttaccccttcaggaaacaggagggctagagagatagcgctcaagttttctttcacagtccctgtttcctaactctaatcaccttctgctgtgggaaagagatgagatgaggcctaaaaaacagatcattgtccgcctcctagattaatgcagagaaagcggtattgtctgttgaatggataaatcttcctgctgtcactcaaaacctaaattcaacgctacttcatttctaagaggcttatcttccttgaatagacccttgcagctcaagtaagaggcgatgtaatgaagcgtgtttttttcttaagtgagaaacctgctgcaaagaagggggaagactgtgcagctgttctaaaggggctctgcagactctcgaaagacttgtcatttatctggtcttgcatgacatcaaatgatagaagatcaagttcaaaatctgccagagcagctcaaaagggcttcttcatctgttaattaaataatggttattaacatacaatgttgtgcagctgggatttgtatcaaacattatgggaaaaatattgccctagctttcaacacttccccttcagtctgtgtttattaggaggcaaatagcttgggaaatggcaatggtcttacccaaatctgaaagttaatattgatgccataatatgtggttaaatgaaagagcaactagacaggtgggtattaggcagatggataaattcaaagtgacatgctgagatcattgaagagtatacccttttgtgtacgcttgtaattaattcagcggtccccacaatgtgggttcactgacttcttctgaaaagttaaatacatgcaacacacacacacacatgcaattactataaataattgcttatttactttggtttaacttaggctactctattacgctaaagtttaatttgaactttggaatagatgtcaagattttcatcactgcaataaattttactggataaggataattttagcagcatttcatcatccactggcttgagtttatgtgtacaagctacaaaattacatttaaatatgtcttgctttattagtctgtatgtaattaaatggcaccacatttaagcttagagctacagaaagtaggcaatatccttcaggaaaaaagtggtttggaaaggtgtgaaactctaaaaaaaaatttatgctccatagtaatttcccttaaaaaagcatcgtgagttgtatcactgaagaagtcctggcaggtttttaattcccactgagtaactgagcttaaaggaaatagtgaccacagaataattttaaaaacttccattttgtgatttcaagtccatatcacacatcttttaagttgtctaaagcaattattttatacttgttaatgaacagggcttataatttagactacccttaatttatagcagttagttatctaatcccttgatatttatgacaataagtaccatattagaaaacaacgtcttttttttttcttagtacgaagcatcaactctgattgttttcctactttgcttactaatcctaatttgtctaaggaatgcatggtcaattcatgttgactgataatccaaaaatctgaatttagtgattagctttgactttttctccaactaaggctatcacttggttagagaacaatgagctccgttaactgacttgaagtttacctctcccatctcctccaggtcctctgtagaaataacaagtagagaaatttccagaagatgtacaatgaaatagggaggaagtggaaaatacatggaaaatatgcaaattagtctggctgtggctgagagttgcccaatttcaaagaagattctgaatccaaatttgaagccttgttgaattatttgagcttctaggcactgtcggatcattcattcattcattcatttaacacctccatggggcctaacactatgagtctggtcttttctttaccttctaaccatccatctggtgttcagtaaaggcgaccatagaaaagccaactttttagtgtttacagcagttttggagaaaaaaaaaaaaaggcaacttttcggggttttagccagctgtcttgtagattcacttaggttcatgaaagtttggaatgaagagagttagatggctagtgtaaactcatttttattaattataaagcagcttgcagcacagggtttactgataagcatcagcaacaatgtcttttactcaaaacatattatctgcttctcaatgccaggactctgatgacataacagctttttaagcacttactatgtgctgggcactgtactaagttttctttatacgttaactcatttcatcctcacaataactctgtgaaataagttactattattttcctcatatctttttaacatgtgaggaaacagaggtacagagatgtcaattcacttgcttatagtcactcagcttagaagtggcaaaaccaggattcagactcagaaaacttggttccatgctctttaccctacactaaaccatgtctaaagtagcgttagcaagtgaagaagttgagacccctagcatatatctatcttggcccggccagtgctatgtctacacaatgtctaaattggttatttgatattatattaactccaaatccccaaacttgtgaatggcatttatcactcttaactctctctctctctctctgtgtgtgtgtgtgtgtgtgtgtgtgtgtgtgtgtgtgtgtgtaaaacaggaagtgaaatcctggaaaacagacaataaaatgaaatcctgatcatggaccttggatgcatcactgaacctttccaagtttcaaccccactctcatacagagaaatacattttaaatgactaccatagtgcttggtacagagtatatgctattatgattgagaatgaggtagagtgctgaagtttaactagataaattaagtaattagtggcttaccattagagaattcattgttgcagaatgttgggaaggttgaggaaggccatgtttaattgtaaggtatgcataaccttccttacgctggctgaataaaaattccaataccttttttgatgtgccacactgttccaaggcttctctgggacttggggtgcatttcatcttgaactatgaattgcagagatttttatcgtcttctgtcacatacacagcatccttttattgtggtttttgatgcgttaaatatgtttttatggccccctatgtctattgtgcctagcatactgttggtacttaataaacgttaaataataataatatatgtgcatatgagatgtgtggaaaggaatgacatactgttttaaggatctgagattgttcttctggtgcctggggaaaacatacagatgagcatgttactgggaatagattagaaggaaccatcaatagcaatgtcatctccctaaaatatgatgtggctctgtcagcacaaatcataaactccatctcctaccctgcatcactgtagaaatctaatgtggaaagttgaattcctagattaatagaaatgggtatacaggcaccttagaattttgcgaattaacaaatgatgctgtctttcttgtgtatcagtgaatttgtacggtttacagggaaatgctaggctgagctttgggttttttgttttgttttttttttaactcttaagggaacctgtccagagaggttttgagggtgttctgctttatttccttggatgaagaggaggggctccagatactgtcttttcagggactgtttccccccttaactgatatctttgtcagtaaggagacacctgcatccgtgcagttccaccagttgaacgacacaccacttcactagttctcttcctttcccagctggatgcagcccagaatatcagttctctgccttgtgccaaaagccttctaagtccagtgtggaggtgtttgtgtaagataaaagcaggacaaggcggcatccccggacggctcatctgtttacatgtgtcatttggctcagccctgattagctcattagcaaagaaggcaggaaaacgagcaacccagatttggtgattcatcaggtctgttcctctctggggagacagtgctggcattctctgccagtcttcggagtgcctggtctttttcagtcccccagggtagagtttgttaaatgtatttctacccccgcagggcacaccttcccctgctggaaagacagatggcttagattgagaaagggagtcactgcttttagttgctccttttaaaaatcattttcttttctgcatgcagaaaacttattttgatggagccaatatttaaggcgaagctttcttatgggctgtgaaactgagggtctttaatgctttttatgtttgaaggttctattcgagaggtttttgtgaggacataaattacgggtagcaacaggtatatttttcccttagtacaaaggccaagtgtaagttttttactagttaagaagggtctgttcttttctttttgaccttgattttttagcgatattctgctttgcccctgcttcggttgtattattccctgacccatccaattaccatttctatcagcgcttcggaaagattatgctttttgggtgttctgtagatgtctttccagtggcttcacttgatgaatgtgacaagttttgtgttttctccctcccctcattgaattgaaaagttttttttttttttataaatacaggccaataagtgcccaaaggcagtgtttcaatggctgctaagtctttcaaggttaggacttaacctccgttctccctaattcaactccaaccttcagtctgaagccaatcaagaatatcagatgatacttaaacaatgaaggatttctgatattcaggtactgcctctgttcaataggattgcaaattctttgtgtgaagaaagtcggttttgctctaaagtaccgtcacaaaaagtgaaattaccatttgcttggaatgatgccattcatcattgtcagaatactaagcattgtaagtagctaggcctctccaaattaatgccttgttttgcatcggctaaatttcccaaatccttgaggatgggtcatacaaaactcatctcaccattttaatttatcaatccaatatgagttctgtgaaagggagcttccttcactcttagctcttttatttacagtctaattctaaaagaaaaggaaataagatatgaaaataagttggaaaataagataaatctctcggtgaaatcaccagatctcagtcctgtagcaaaacctccataattcatctgtaggtcagctcaagggattagccatgacgtatttggaaattcatttatttttattttattttgctgtttcttatgcataagggtaatgctgtccccaaggcttttcaggtagccctcaaatcttgacaacatttgctgtctctgaggcctaagccaaaattaattttcaaataaacagcataaaaatgtatggagttgtataaatttgaatacaaaatgcatttgttttgtttgcttacatacatacatacatactgtctgttcagccaaaaaccataatatcacattgaaattaatggccatatgcacatcatgaaagtcaaaaaagtttttcttgagttaaaaaaatgcagaacatgcagcattttatttcatttccaactcaacgtggtctttaacatatcttcataggatgtgttttaattgtttatttttcctagaaggaaatttaaaaatcttccataggaaaaactggtacctaggaaattgtatggtttttattagttcaaaagattctgttgccttgggagatatgaagatattttcttcttgaaagttaaaaaaaaggtaaaccaaattatgccgcttgatttccttcctctgataaaagatagataaaagcaatgtagaattaaaatgggatgaaatccgctaaggtctatattgggacttctttttggtggctacaaggaaaagaaaaaaggattctgtagttatacaaagatagtccaggaggcaggcagtctggctgacggtatgctgcttcggctgccgtcagatacctgcatctattcctcacatgatgaccagcccacgggagcctacaatatcatgaatgccataatttctccctttccaagattccagccctcaaaatggtttttaaatatacttccacaagggggctttgtgtacatttacaaaattttttgtttgtatgcttagatgtttcttaaatatattaaaaaatgaacttcttccgaacaaggcatggaagtttcattcgttcgccttttgaaatctttattatgcagaaaacaaaaccggctccctcctcctgtgtagcctctgatgtggaagaggtctgtgaaagcagagggtgagggggagaagcctgggagcaggagctggtgtccagcctggctaggctgcccctggggcgtggatctttcagctgtatttcagcttgtggggtgaaagcttcaacatggcccagttttgattgcccagctgaaaatggctgtgtatgtgatagcattttttttttcttatactttaagttctgggatacatgtgcagaacgtgcaggtttgttacaaaggtatacacgtgccatggtggtttgctgcacccatcaacctgtcatctacattaggtatttctcccaatgctatccctcccctagtcccccaacccccaacaggccccggtgtgtgatgttgccctccctgtgtccatgtgttctcattgttcaactcccacttatgagtgagaatatatgcgatatttggttttctgttcctgtgttattttgctgagaatgatgatttccagcttcatccatgtccctgcatcctttttaatggctgcatagtattccctggtgtacatgtgccacattttctttaaccagtctatcattgatgggcatttgggttggttccaagtctttgctattatgaatagtgctgcaataaacatatgtgtgcatgtgtctttatagcagaataatgtataatcctttgggtatatacccagcaatgggattgctgggtcaaatggtatttctggttctagatccttgaggaatcgccacactgtgtttcacaatggttgaactaatttacagtcccaccaacagtgtaaaagtgttcctatttctccacatcctctccagcatctgttgtttcctgactttttaatgattgccattctaactggtatgagatggtatctcattgtggttttggtttgcatttctctaatgaccagtgatgataagctttttttcatatgtttgttggctgcataaatgtcttcttttgagaaatgtctgttcatatcattcatccactttttgatggggttgtttgatagtttcttgtaaatttgtttgggttccttatagattctggatattagccctttgtcagatggatagattgcaaaaatgttctcacattctgtaggttgcctgttcactctgatgaaagtttcttttgctgtgcagaaactctttagtttaattagatcctatttatcaattttggcttttgttgccattacttttgatgttttagtcatgaagtctttgaccatgcctatgtcctgaatggtattgcctaggttttcttctagagttttgtatggttttaggtctcacgtttaagtttttaatccatctttagttaattttgtataaggtgtaagaaaggggtccagtttcagttttctgcacggctagccagttttcccaacaccatttattaaatagggaatcctttccttattgcttgtttttatcaggtttgtcaaagatcagatggttgtagatgtgtggtattatttctgaggcctctgttctgttccattggtctatatatctgttttggtaccagtaccatgctgttttggttactgtagccttgtagtatagtttgaagtcaggtagcgtgatgcctccagctttgttctttttgcttaggattgtcttggctgtacgggctctatttctgttccacatgaaatttaaagtagttttttcttattctgtgaagaaagtcaatggtagcttgatggggatagcattgaatctataaattactttgggcagtatggccattttcatgatagtaattcttcctattcatgagcatggaatgtttttccatttgtttgtgtcatctcttatttccttgagcaatggtttttagttctccttgaagaggtccttcacatcccttgtaaattgtattcctaggtattttattctctttgtagcagttgtgaatgggagttcactcatgatttagctttctgtttgtctattattggtatataggaatgtttgtgatttttgcacattgattttgtatcctgagactttgctgaagttgcctatcagcttaaggagattttgggctgagatgaaggggttttctaaatatacaattctgtcatctgcaaacagagaccatttgacttccttttttttcctatttgaatacccttgatttctttctcttgcctgattgccctggccagaacttccaatactatgttgaataggagtggtgagagagggcatccttgtcttgtgctggttttcaaagggaatgtttccagcttttgcccactcagtatgatgtagactgtgggtttgtcataagtagctcttattatttttagatacgttccatcaatacctagtttattgagagtttttatcatgaggggtgttgaattttatcaaaggccttttatgcatctgttgagataatcatgtggtttttgtcattggttatgtttatgtgatggattatgtttatagatttgcatatgttgaatcagacttgcatcccagggaagaagccgacttgatcgtggtggataagctttttaatgtactgctggattcagtttgccagtattttactgaggattttcacattgatgttcatcagggatattggcctgaaattttctttttttaatgtgtctttttcaggttttggtattaggatgatgctggcctcgtaaaatgagttagggaggagtccctctttttccattgtttggaatagtttcagaaggaatggtatgagctcctctttgtacctctggtagaattcagctgtgaatccgtctggtcctgggctttttttgattggtaggctattaattactgcctcaatttcagaacttgttattggcctattcagggatttgacttctccctggtttagtctttggagggtgtacgtgtccaggaattcatccatttcttctagattttctaatttatttgcatagaggtgtttatattattctctgatgggagtttgtatttctgtgggatcagtgatgataatatcccctttataattttttattgtgtctatttgattcttctctcttttctgctttattagtctggctagcgatctatctattttgttaatcttttcaaaaaaccaactcctggattcattgattttttgaagggttcttcaagtctctatccttcaattctattctgatcttagttatttcttctgttagtttttgaatttgtttgctcttgcttctctagttcttttaattgtgatttaggtttttgattttagatctttcctgctttctcctgtgggcatttagcgctataaatttctctctaaacactgctttagctgtgtcccagagattctggtatgttgtgtctttgttctcaaagttctttgaaataagtttcaaagaacttatttatttctgccttaattgtgttatttacccagttgtccttcaggagcaggttgttcagtttctatgcattgtcaggtttgagcgagtttcttaatcctgagttctaatttgattgcactgtggtctgagagactgtttgttatgatttccattcttttgcatttgctgatgagtgtttcacttccaattacatggtcaattttagaataagtgtgatatggtgctgagaagaatgtacattccgttgatttggtgtagagagttctgtagatgtctattaggtctgcttggtccagagctgatttcaagtcctgaatatccttgttaattttctgtcttgtagatctgtctaatattgacagtggggtgttaaagtctcccactattattatctgggagtctaagtctctttgtaggtctctaagagcttggtttatgaatctgggtgctcttgtattgggtgcatatattagctcttcttgttgcattgatctctttaccattatgtaatgcccttctttgtcttctttgatctttgttggtttaaagtctgtttcatcagagacaaggattgccacccttgctttttttttttctttccatttgcttggtaaatattcctccatccctttattttgagcctatgtgtatctttgaacatgagatgggtctcctgaacacagcacaccgatgggtcttgactctttacccaatttgccagtctgtgtcttttaattggggcatttagcctgtttatatttaaggttaatatttatatgtgtgaatttgatcctgtcattatgatgctagctggttattttgcccgttagttgatgcagtttcttcatagtgtcaatggtctttacaatttggtatgtttttcagtggctggtaccagttttacctttccatgtttagtgctttcttcaggcgctcttgtaaggcaagaacccggtggtgacaaaatctgtcagcatttgcttgtctgtaaaggattttatttctcctttgcttatgaagcttagttgaactataaacccctgactggggctgctgcttttatttcagagatgttctgcccagagatgaggaatctagagaggcagtctggctacagtggctttgctgagctgcggtgggcagtgcctagttggaagttcctggtggctttgtttacactgtgaggggaatacttcctactccagcctcagtaatggtggatgcccctccccccaccaagctcaaatgtcccaggtggacttcagactgctgtgctggcagtgagaatttcaagccagtggatcttagtttgctgggctttctgggggtgggatctgctgagccagaccacttggctccctggcttcagccccttttccaggggagtgaacagttctgtctcggaggttccaggtgccactggggtatgaaaaaaaactcctgcagctagctcagtgtctgcccaaatggctgcccagttttgtgcttgaaactcagagccctggtggcctaggcacctgagggaatctcctggtctgcgggttgtgaagacagttggaaaagcatagtatctgggccagagtacactgtccctcatggcagggtccctcatggcttctgtcggctagagaagggagttccccgaccccttgcatttcctgggtgaggtgacgccccatcctgcttctgctcaccctccgtgggctgcacccactgtccaacgagtcccaatgagatgagctgggtaccacagttggaaatgtagaaatcacctgccttctgcattgatctcgctgggagctgcagactggagttgttcctattcagccattttgcccctctccttttttgttttttgaatttaactcaggttctaattgtctcttttgattttgtcccagtggtccttatatttttttccatgtaattataccacctctgagtacagatattttcatagttgtacatagtttaactgtctaagaaataagaagtgttatggaaattaacaactttagaaaacaagaccaactggtgacatctctgcaatgtttcctcagggtgtcaggaaagagccctgggctggaagtctacagactggagtttgagccactgcgtcatcatcatctggcttgattttactggcaaagcattttcatacttctgtgcctcaatttctttattaataatgactttcaggagccttactgtatctgacattctataaggattgggttgctttactccctgttttctcctattcagggcaatattaccaaatataaatatattagtggctaaagtaataaaatcagaggaggttgcatttgtggtacctcatgcatgacctttgaattaaaagagtcttcagtcggaatccaagtcctgccacatgctagctacgagagtgggggtgatgggaaatgaacagatagttctctaaattttggtttacttactgtcaaacaagggtttggactagaagttattctaaggttcttatcctaaggtatgtttctaggattttaaaagtatttggaaactggcagagctttgatgccactttttgttagtgtttgtgggccacatctctgaagagtggcctaggcccagacatggctggatttctcctctcctgattgtccacttctgattcacattgtgtaattcatcccaatggccaaagggacctgaaaattgaggcaacgacataaaccatcgtcaacacactagaagatgagaagcccatctgacctgtgttgagtatgaggaagttgagcccagagaagtttggctgattctggtccaggccacaatgagaaggaaagtcagtttgtaatgtaattcagaatttaagttcattttcctcaccatgttggatgacattttaagaaagttgggatatagaagttgttcccaaggtggaatgcctggccaggttttcacgaattcattcctgcataggtgggcagacgagggaaagcaggaggggaagtagaagttcaagtaactttctattgggatctgggaagaagttgcactattgtgtggcttgggctcatctgctgggttgccagggtgatctgtgggctggctgcagggagcatgggatccaggttagcagctggctctttcactggctgaggcttggacaggttattaagttcccattccatattctcatctgcaaagttggggaaataataacccccatcaatggggcttagaataggtaaagccccattgcatggtacctggcaatcagcaaattgtggttgtagcttttgatattattaccgattattgtaattttaaaaccagcctgatctgcagagcagagagggcacttgaaagagtgcttccttaagctctcagcaggagtggggtgtcattttcaagaccctgtggttgaggctgtttggtgctcaggctctgccacaaggtgcatgcccaggtacctctttccacagtcttcatgtattagtctcttaaaactcttccccaggtgatatggtttggctctgtgtccccacttaaatctcaactcaaattgtaatccctacttgtcgagggaggagcctggtgggaggtggttggctcatgggggtggtttcctccatgctgttcttgtgatagtgagtgagttctcacaagatctgatggtttacaagtatttggcagttcctctcattgctctttctctctcctgcctccatgtgaagaaggtccttgtttccccttcgccttccaccacaattgtaagtttcctgaggcctccccagccacacagaactgtgagttgattaaaccttttttctttataaattacccagtctcacatagttctttaaaggagtgtgaaaactaactgatccaccaggttaccagtggtgtgcatgctaggggctgccaaacctccctgactccctcatatgcccctgttggagaacacaaactactaacagatatttctaataactacttgaggtgtacactctaggcagattcaaactctctcactaaaacccatctatgaaagcaacacaagcctgaccacccagatttttctggagctccattcccagagatttcctgcaaagtcctgggactttgaaacaacattgtcagtgggaagctgggaagtctcagggcctgggtaatcccaaatagctaaaggatggaagccatggctgggcagtatttttatggttaccagctcccttgaaaagtgaggtgaaggataagcagccttaggtccagccaaggctggcagcaaccttgagagagcaaacccagacagatgtccagagctggacagagataatggtgagaagacagtgagtgaggagggggcagtggatccgaggaaagcccgggtgaagttacttggttcaccctagactgcgtggactacccctccttgttatccctcacattgcatttgggctttctgacaccattctccaggatgctccaaagtagataggccttacagtcatattcaattcaacaaacatttatcaaatgcctcccctgcccctggtgcttgctaggcacagggttcggaattggaaggtagttctcccctcgtggagttcagaccctggacacccctccccactgtgtaaccttgggcagcacactcagccacactgagctttcctttcttcttttgtccactgggggcaattgtgtgtacctcaggggtggctgtaaggattgtatgagatgaaacacttaaaatgagaggcgcataaaagatgctcaatacatggtgcctttgctgcacctgttctcctgtaccatccttcttcaaagttctctttaatatgaatttctagcagagttcacctggctaaacagaaggatcttcatgtataaatttctcctgggattggggaaggctctgtgagtatgtgtgtccaggtttagtttgcagcatttgtttggacacctgaagcgctatggtttttaagtgagatgaaatcatgtagtgaagagagttctttaaattgaacctcattacatgaaaccttttagtgttcagaggaaaaaaatggagattttggtaattaaatttgatatttcaaacaggaaacttgtttcattggacttgcatgggcaataccattttttatataagtagctcttgctaaagtattttttgggggggcacttgaattatagtaaactctatttgactaacctaagacctgctgtggaaacctggatttaaatatatgataaaatttggaaatattttatcacatctatagcttatttgatttggaaatatatttatttcatatatagattatttgtattttacatcccaataagcatatgtgcattgtttttctttaacagggcttttactacttttttcctatattctgattctttattatgttaatttgaagcaggcatagactaggagaattaagcttaagacttttctttttataatgtttaactctcagatggtgagtcttggctggttcatatatgtgacatttagtcttttgaatacaagtagatgtcttgtatgtttgagtcgtcttagtgattgaaataagttttttctttttaaaaaaatattaattaccccatggtcaagattattgcaatttactctacaccttttcttcaatttttttctaatgctgttagttattccctttattgaaaagatctgtctttcttataaaataatcatctttgataagacacactttggtaaccactatatattatggtagccatttttaagcaaacaattgattttagatggggctcttggtcagtgtactgtttttctgggccattccaaatagagggaggagactgagagaggaagaaccattctgaaggcccggaagagcacctacacttgacatttctgagaatgactgtgataactgtgagtaattctggtgaatcttatgacaggaggacagttttgagaactgactcagcttcattttctttcattttgttctaaaaacacctgaagctctttgtagaggaatgtgtgaatcgctatgcctgatgtccgcgtagtgtcctgtccagcacccttcacaccggaactattataatcaagttcctcgaatgaagcatgacttgcaagttgaattccaaaaagcttccgggatattcaggaaggaggagggtcaatctttcagtagatttgctccactttccaaatttacctccagatgcagactagatggccaaaaggtcaaacaacacacatttcaggctggttgggcttgactgttttgggatatttgttcacaaaagatgttttcaagggaatagtagatcaaaacatgggatatgtcaatatcaaagttttctattatgtggatttaagtttcaatgaataaacctgctgctttagtttttggagatggcgcaggccagttacagttgtacatggtggtagtgttggcctgagaaggtggagttggttttatgaacctgctcacccccatgcctgttctccagggcagagcagtctgctggtgatgtctctttgcatgccaattaccataggattctgacttgtctgccagggtgcaccctctgctggaacaaaagaataatcattgcctccaagaacagacttagaatgtgacccctttcaaagcaatcatctcttcttccttatcagcattttttttttttttttttttgagatggagcttttttcttgtcacccaggctggagtgcaatggcatggtcttggctcagtgcaacctccacctcctgggttcaagcaattctcctgcctcagcctcccaagtagctgggattataggtgcctgccaccacgcctggctaatttttttgtatttttagtagagatggggtttcactatgttggccaggctggtcttgaactcttgacctcaggtgatctacccgccttggcctcccaaagtgctgggattacaggcatgagccactgcacccagccccctaccagcatttctatgtgataagcagccccccagactgttgaagatggcttttcacagacatgaaattcactagtccttccaagcatggctcctttctggagagtttggggttttgggaagccttgagagtctccagggttttgtgggttggataactcaatatcttccaggaggcggaaaggttaagacaccaaattcatgttgctacacaattaaacatcaatacacgtagctgaagcactttaaactgcggcgtcggagttttttgagggtgagcccctccaccataatacgctgcaatcttttttgggttgtctccctgccccacttccccagccaaatatgaaggcagaaacaacatttctaacatgccacacctcacagcaagtagaagcaggaccggagagactgcaaacgactttacttacctagatcatcctctatgaatctatctcagttctaaccactgtttatttcattgagagcactctgtttattttgtttagagataagattctggacccttgcaagagaattttattgtttccaataaagaatgttttaggtgctcattgtttctttttctatcttttttttttctttctttctttcctttttttttttttttttttttttgagtattgctctgtcacccaggctggagtgcagtggagcaatctcggctcactgcaacctccacctcccaggttcaagcgattctcctgcctcagcctcccaagtagctgggactataggcacacaccaccatgccgggctaatttttgtatttttagtagagatgggatttcaccatgttggccagactggtcttgaactcctggtctcaagtgatctgccctcttaggcctcccaaagtgctaggattacaggtgtgagcacacatgcccagcctaggtgctcattgtttctttacaatgttttatgttaaatattaagaaaaaaagactaaataatggacacctatgtatctgcaaatacgcattcagttgtctttaataatcctttgctaatcttgcttcagatggattaagtgtgcgtgcctgtgtgtggtgtgtgttttacattacagattagaacttaggtcctctggattcacaaccccgaatcccatttgtttttcttcctttccaaagttgtcattatcgtgaatttggtgtttagctatcccatgcatatttttacactactgctataacatatgtagttataaaatagcattgttttgtatgctttaaaactttatttaaatgggaccaactgtttatattatcctgatcttctttcccttatcaacagtatgcttttgtgatttatctgtgatgttccatataggtcaaattctttcatttttattgctttataatatttcatcatatgaaaatatcatgatttatttatctatttccctattgctagaaatgcatgtcattttaaactttttactattatcaataatgtcacaatgaacattgttgtgactcttatgtgctttattagatgttaccaggttagtctccaaagtgattgtacaaatttttactcttacttactgtgtatgaaagctccaatattcatatacccttacatcgaaaattataaaacttttaaatttttgttaatattatgacatggaattatattttattattttaatttaattaaaatttttctgattactagagaagattgaacctcttttcattttattaccatttggatttccttttctgaattgtttgttcatatttccctagttttgattagagatatttatatttttcttattgatttgtagaaattccttataaatcatcagatgccgtttgtagaaacctctttttagttataaaaatacccacctcagagaaaattagaaaatatagaaaaaaaagtcacccaaaattctactatctttaaccaaaacattgattcatttaggcccatttgctgctagtctgtttttttcctatgatattattgtcattgtaagtataatgcacacatggtctatatcctgcttttatcaattaatatatctaaatttattttttgatgcttctgtatggcttttgtagccatcattttaaacagaagtatgctatatcattgagtatttctgtcatttattgttaaacattcaagttgcttttaaattttcaatttgtaagtaacattatgaagaaatactttctgtctaaaatgttttgataattttatattattttcttagattaagttcacagaagtcaggttatgggccaaaggggatataaattttttataaagtaaaatgcattgttaaatattaaaagtaaaaatattacttaatcaatgctggcaatctaagaaagcagggttcaagaagactcaagggagtccagcataagtctaagtatctaagtcacctttggcagagggaaaacaaaaatactttggtttctctagtcacctttctgacccaaagcaccattcattacaggcattttctttcttgcatttgcaactttttggctttaaaagaaaaagataattttccagagctaaagcataacacttacaagcttaataattataaataaaattttactgattcttaaacacttataagggaatgtggttcattaatttcgggacatgaaattggttatacaagtaaaggtagaaatgctgccctgagcattgggtgactgtcttatagaacatgggcatctcagcactgcttggtagggcttttatgtttatatgatttactttttggcattagtggtataataaaagtttcagattatcctgtatgaaaaaaacatttatttgaaaatatgtaatacatctagtcctgaatgtatgacctatattcgaaaagttcctttacaagtcagttaattagaactcagaaagcattttcccttggaagtaatattgtaagtggtggtgtggtttccagactggcacataaaaacccatttaatctgtcgtatatctgtagtatcgccctggtttcaaatctagtttagccacagtccatttgggtgatcttaggcacttacgttacttaaattcctagtctataaaatgaggagaaggtgtttgtgaggactattttagataatgtgtatgaaatgctttatgaagtataaaatgctgcataaaagtggcagatatattgttttcacccaccaaacaaataactgttaaagggcagaacatggtatatcactggagcttcaaaatggaaagtgtacaccccaggaggtgtgcaggtgtggagtttacagacgtatagtagaatgcctatgtatattatttctttcttatcctagtattattttttgtgagtttgcatcacagcagaatacctatataatttgtaaatacatacacacacacatacatgatgaatatgctcatgataatttttaatgtattgtttgaccaagacagtttggagcccactagttcatttatatcttcacccagtcaagaatatagagcccggctatgaaaagtgatataaattaaatagataaaccaagtttatatgatcttcatttataacattatttctatgcaaagtgtacctcatgtaactctagctttgacaatacaatgtcttttggcatccaaacttcgcccctgctagtgggttgttggcagtcctagcttaggagattctgggtatgcatacttgtgtgtgtgtgtgtgtgtgtgcgcgtgtgtgtgtatagtgtgtgtgtgtgtagatgctttgagaagacagaggattgtagaatatcagtaactttatacattagcatgaaaaatgatgagaagatagttctctctgactgggtctatcatcattcattattgtttttttctagatgtctggggttgagagggaatctagatgcttttttcccaaaggtttaagcattggtaagttgaatacttctgaccgatgattcctggaatcttaaggatgagagtaggaggataaagagaattgtagcagctgtttctttgtagttactgattttagactcctgaatcaggaaaagtatacaattgaaaaaattattaaagcagtgtattgaaaactgtcaaaaggcctcattgttatttcatgtaagtcagttttctgggctgaggcccagatggctaagtgggtgctgagatactcgctggataaacaatgatatacaattaatgcaacaaaggagatttgtgccaattatttccagaaccaaaggccagtgaaatactttaattttatcacacacatctattttggcagtgagcacttagagttttataggaaaaggtaagccatgccttggggtccgaaagagaatgggcgtctactggtgagggttccatgatatggaaaacactagaaaaacagcaggatggaggtgaattataatagatttgacataagtgagcaagactaaatacgttttgaaagcagtgggccattcagttatttcttttatttttcatatttttctcgactctgcaaaataataagaaacaaaagaaaaatctgctgaatgcctagtcatagtttattggagcaggaaaataagccattccaaaccattctctgatttgctgtgagtggcagaatcattcaccgtggtgaatcatagcagggagaaccatttggaatgattattttctgatgttaaattgcaaatggcacaagtggaatcaacaaaggtatgaattattttaaaaaatcttttaaaaaatcctgttattgaaaaatatgtatttgtatgaccagcttatgacttcatttcactagcttataacttcatttcacagtagccaagccttaagtacatatctgtttgttattacatttggctaattgaaagcctttctagttaatatttttatgtaagaaatagtattattgtcctagaagctgcatgatggttataatggtggggataaatgtgtatatgtaaacatttggtccaaccaactaggttgaagaaaaagtgtgtttcttgccttgcctacagtgaataaggaacctgttggctgatctacaaacaaaataaactgagggattagccctacctgggtgaaacttgttagtgatatgcaaatggtttatcattaatataataataggcactatttagtactaatcctttgagaatctctgatggtgtagacaatatacctgatgcttaagatgaaatatcatctgcctccagtattccacgagttgtttttgttgaaaagcttcaggttgcctggccctttaaggcaaatctctggtgttcaaattggtgaagtaaaaagatattttatgctccagtgtctgctttgtgtgaatacttaattttaagagggtagagtgaagtgtttctatttaaatttagggggaactatgagggtggggtggtgactacattccatgaagttcccttttttttccttttaataggaggccctggactcagctcaatggttagcttcagtttttagtggccttaaaaactgcttttgacaggaaagctggttgattcttcaggggagggaacataggatttcagaaggggcacattcccttgctatctgtaacattaggtaccctgactgtacacagagggcacccaatgtatactctatgagtgattgaatacatatttaagacaggacttgcagcatttccggcctgagagcaatgaggtggggttgtaattgtgtagatctgggcacattcttggcactccttacaccatgtcctgggagtggatacttttagcccctgtactaattattgctgtgtgacaaattttccctaaatttacagctttaaacaataaaattttttattttttattttttagattctacgggtcaggaatctgggagctggcataacagtgtggttgtagcgtagggtttcttccagggttgcaatccagatattgctggggactaccgtcatgtgaaggctggggaacatatgcttccaagctcattcacagaagccctcagttccttgccacttgggtgtctctatagggctgtcatgacatggcagctggcctcccctcaagggagtgatgtgtgtggacacatgctgctttttatgaccttgtctctgggtcacacactgacacttctctttattttccttgttagaattgagtcactgaatccagctcacactcagtaggaggggatgacgcaggggtgggacaaccaggaggtggggatcactggtgctatcttaagagtctggctaccacaacccctttcagtaaattttgttcagttacccaatgactcaagatattatgaagatctgcttgaaatatttcattacagaaatttggttcccctttacttcaccttcaacaaagtcattcaagtatctttctcagcccaaatccagtagatcagagggtcgtattcaaaacatcactaccaccaccaccatccactggtgggagccccgagtcagcctggggaggaaataaagtcattcagtggaattacatgagattaaggtgctggcttcagttctgttcccacaaaatacatgtccttgttgtaggaataagtagctttaattggccatcaaaggaaagttacaaggggaaaagactattgtacatgacatcctcaatctgagacctggtctctcttttgaaaggagtttaaagaacttgtcatttcactaaccaaaaagaactccacttacaatccacattttctcaactacaaaagatgcttgctgtaagtaaatctagttaaaatatgaaataaaacaaaaagtacataaggtttagaccactgatgttcatgacttagtcccccattttattttgttttaaaaagctcagttttcagagatcgtttagatgccactgactttaaaatgccagtccgccagggtgaagacacaggctgcgtgttgggagaagataagtgatgaattgcttttatacgatatgttccaacaggtattaaagtatgtttaaggagcccaggaagtagggccatattaaaggatgtgttttgtattttagtgagactcttgggagctggaggtaaccagagaaaaatggtacctcgaaaacttgggagacaccttctgagaacaggacacagacaaggtcaggctgggcattcaagatgttcaggcctttctcctttgagacttgattttttccttcatggttttaggcctacagtgcaattattttacattgttagacccctgtttggattaaagcttctttcttttgtaaccaagtgtagaggaagtctctgtaatagatacttatttgggggtcttgggagtatttctgttttcatctttattctccattggcggggggctggccatttccttctctgccttccttgccaaaatgcctatataacaattatcacatttttctatgtgctttccttctcagactgtgaaatccccgagggaaaagactagattctactagccatgtatccctagtccttagcagagtgcctggcccatattaggtataaataataatgttgaatgaatgaatgaatgaagacatgaaggaaggaaggaacaaataggcaggctgctgcttgtatttcatcactcaagctgtgaattatatttctgggcccctaaaagaaaattttagatattttggaatgggtcagatgcatctgttagaaatataaatgacataaaatcatcatacctcttctggtaaacttatttagaagttaaagatctggccacctgcattagcagctcaggagaagtttagattggcatttagattagctggctctgttattcagtgacttgcatacttgttcaagggcactggagtcaaccaatgtttatttttggattccccattgctctcgggatcactgcagcgaagactggtgcccccaaccccctattacctccttcaccttgtttgttgttcctggtccagggaggactgcagcccagattcagcctgactagctgctccttggtgccctgttatttttagtatatgaaccacagcagcagctggcaaccctgagttggcccatacaggcttagtttttgtgaggttgaaactatgggtttaagaatattgggaatctctggtttttatgtccttgcattatctcatgataagtaatatattatttttaactttcatctgtgatgtgccaatctttaacagtgaaaacttacactaaaagacctctgcctggttttggataactttgcctgtattttacgctgaaagtaaagagaataggaagagaggactttaaaaaatgaaatcatagtcctgtgaggaaatcttttttaaaaattgaaaactctttaacttgaataacagaaagcttttggggaagactaggagctctgaaggcataattgaagtgatgttgtttaatgtaggcgaactgctgtaataagcaaatctcagcacgtgttcattttttccctcatatagtggtctgatgtaggcctctgtcaatggtacagttgtaagttctgccccactattttcagggacccaggctttgtcacttttaccatgaggcttctaacatcatcacgggggtcaatatcctgccagcagatggggaaacagcatggaaggccatgaggtttctatggagctggccaggaagtggcacacatttcttctattcagatgccactggctgtagccttatgactgctttccacctaaatgcaagggaggctgggaaatgtagtgttaggactgaattgtgaccctccccgccctccccagcaaccctggccaaattcatatattgaagccgtaacctccagtactctcagaatatgactgtatttggagataggcctttaaagagggaattaagctaaaaagaggccattagggtggaccttaatccgatctgactgatgtccttataagaaaagacaattaggacacatagagagagacaccagagatgtgtgtacacacagagaatagaccacatgaggacacagagagaaagtgatcatctgcaagccaataagagaggccgcaggagacaccaaacctgcgaacaccttcatcctggacttctagcatctggaactgtgagaaaataaatttctgttgtttaagccaccccatgtgaagtattttgtaatggaaattgtggcaagctaatacatataatctacctatgagcccaggaaaaggtagaaactgacttagtgattagctagcagtccctgccacaatgtaaagagtgccatttacttatctcttgctaattcattcaaatgctcttataggtacttgggacataatgagcaaaatagacaaaaatttctgctgtacagtagcttcagttttagcagatactaaagcaaccaattactatcataccatcctgctttattttctttttttagcacttatcactatctgaaattatcatgtttattgatttgcttattatccccttctaaaatgaacagaaccccccttttttatgctttattttttaaaaattctattcttaatgcctcaaaaatgcctggcacataggaggattttgatatttatttgttgaggattgaatgagatatcatgaaattgcatttcaggaaaaaaatcatgtaaggaatgatttcttgagtctaaggtagaatgaacagaattttctttttttttttgtctttgaaaaaagtacctggtagctgaccttgtcctttaacctctgaggtcatttcagttatttaatcctaaaattcctacttgttgtctataaaatattataagtttaaggtttctgatgtgcacaacacactaatgataggatatttaccttggcatttttttggtttgcttgctgtatcatgatttagttacagaatcatggagattcaaagtgactggggacttagggatggcaccgccccacttcctcactttaaaaatcaggaggagcaggctagaaggaaatactggtcttacagagcttgcaagtggcaaaacatagaccagtctctggatttgggcctgcagtgactcacccagcactctttctacaacactaacccttttcctatttgcattaaaggtggattgaatggtggttaagagtgtcagctttggaccaggctgtgtcggcttggatcctggctccaccactaactagctgtgtgactgtggtaagctctctgtgcctcagtttcctcctatattaaatagagagaagaatagtactcaccttatagagttgttcttttaactcttttaggagttaatacatgcaaagaatttagaacagtgaccaatgtatagtaagtattcaataaatgttagttgctattattattattactcttgctattttaaagtgattaattatataataaatggccaaagggcttttgtaggtataagaattttgatgatgttatcaaaatatctattgacaaagaaaaaaagaatgcatagactattaatagttttcatcacacctgaagaactaaacataaatcctgactacgatttcttcaccaagaggtttctcaaatttctttttattgtgatataattgacataccataaaatacctttttaaagtatacaatttcatggtttttagtatattcacaaagttgtataagcattaccactgtctgattccagaacattttcatctcctaaaaagaagcctttacctgttagcagttacttctcattatccctccctaatctactttctgtcccagtggatttgcctattctggacatttcagataaatgcaatcacacagtatgtagcattttgggtctcttttacttgaaagcctaatgctttcaagattcatccatattgcagcatgtgtcagaactctattcctttttatggctgaataattttccattgcatggatataccacattttgtttattcattattcattgagtgacatttgtattgtttccattttctagctattataaataatagtgctgtgaatatttgtgaacaagttttatgtgggcatatgttttcagttctgctagctgtggacctagctgtgaaattgttgggtaacatagtaactctatatttaactttttgaaaaagtgccaaagtgtcttgaaaagtgagctgcatcattcccaaatatttaaggtacaatatttgaatattaatttgaccttgcttgattggaaatgaaagagaagtcatttgattccaatattcctagaaaagactctcagttgttcacaaacacttcagagtatttgtctcagcccctgtgatgggcactgcgtaaaccaagacaaatgaaacatagtttctgattctgaggagtggatgagaatttttggcatttcaagttgactttttttttttttaaagtgtagatatttgttttcttcttttattacttgtcttctcttttggatatcaccactggacatttaggaaagactcttaatggggtactagatgtgttaagacctggagggctggatggatggtgcacatagaagtagacagcagataggaagccaggatatacaggatcaagagactctcaagtcagtggattatttaggtgtaatcaattgtcaactcgtttcatgactgacagtggctttcctctccaccacagacatcacttaaaaaggaaagggcagcactttgggaggccgaggcgggcggatcacgaggtcaggagatcgagaccatcccggctaaaacggtgaaaccccgtctctactaaaaatacaaaaaattagccgggcgtagtggcgggcgcctgtagtcccagctacttgggaggctgaggcaggagaatggcgtgaacccgggaggcggagcttgcagtgagccgagatcccgccactgcactccagcctgggcgacagagcgagactccgtctcaaaaaaaaaaaaaaaaaaaaaggaaagggaacctgtctctcatttataaagaccacatttgttttccatgacagaaatctgatggaaactttcattttcacagaattaccaccttgctttggtttggggtctaggtaatcataaaattttgtgagctgtggcaaatcgtatatataattgtatccacagatgtctagttgaagaaacaaactttgaaggattttgttctgttgctgcccactgaaatgcatatttcttaagcacaagcaggtaatgctttcttatgtagaacactgaaatttaccagcacacctcttgagttccttgtggcgtagcctggttctgttacttcactagaagctctcatattcatgctctgctggtaactttcaaccactgttttcacttcttcactgaaatgggtgacaattacgttttcatcttggatcaagaagtttgtttacctgctgtgtaaatggctgtaaaaattaggcaaatgtatttgtggagagtaaaatgagcctttaacctttcaggagcctgtccaggtggaagtgagttaagtacaggatgtgaatggggtatcttggcctggaaaaagacccagtagacataactttgcatttgctcgttttgttcaacttttccttccttctctgcctgccaaagaaactgtaataactgtaataatttttatgactttctcttcaatgacagttatcttcctttaccctaattccttccctcctcatccttcaaatccccttcctcatcattcaaagtctaactcaagctagcctttcctccttattttccccttatctttccaatccgtatggagatttctcacctttcctgatagaggttgcgccagaatggtgaggattaaattgtaattgctttctaatagactgctgtgtctgcccactagatttcaagctctctaaaggtcaaagctatttcttacattagttttgaatccgcttctggacagcgccacatcccagaggacttcctcactcataagcctatgagggtcaaggcaacaatgtaggagctagtgattctcacaggaacacttatttcagaaaagctatgctgaaaatctgggttttaatttgaactactaggccttacttggccttaaaaaatgacatgtaatcttttctgtgctgtcccttctccaagaaggtgggcctcaggcagatgaagaatcgaggacacagggaaaatcctgggcaagctgtggcactgggggagtgtggtttatcccccagaacaatctaaggcagtccacacctgctgcttcatgactagggtttcaaagctttgagaactggcataggcaaagcttgtcttttggtatcaggataagtttcagtggatttaaaatgtgttgtaatcagatttaagtccagaaagcttttttttttttttctttacttacagtgaaactctctctttaatgctgtttggtcaaataaacatcaacaaccacgttcaagtttcttggtcactcctgaatcctttcttttaagtgggagtgggaagttatacagagacaagtgtcggccgggcacggtgactcacacctgtaatcccagcactttgggaggccaaggtgggtggattacctgaggtcaggagtttgagaccagcctggccaacatggtgtaaccctgtctactaaaaatacaataattagctgggtgtggtggcatgcgcctgtagtcccagctactcgggaggctgaggcaggagaatcacttgaacccgggaggcggaggttgcagtgagctgagatcgtgccactgcactccagcttaggcaacagagtgagacttcgtctcaaaaaaaaaaaaaaaaaaaagagagacaaatgtcagttttacgtgtttatggcccagttatggaatacccacgttatttaagctctctaggtatcagttaccacatttgtaagaaggagaaaatgacatgtacctattataattaatgagagtacccagtgcctaacatatgtaaacctataacctaaaatggagcacagaataaaacagagcttaattaatcacacttgtctctcctcctgttcttttggcctgaatgatggagagagggctccagcaagcagggacatctaccttatctcctctagtatttacacgtctgcattcaaaggggatgcagacctctctattgtccctttcatgaactgtagtatgcctctcaagtcatcaaactatcggcctgaataaaggaaaaaacaaggaagatgttgcaggaggtttattcccttctgtaaaagagtgttaaggttttagctccctcttactttttagagcttgtgttccaagaaactgaaaatgctttatctttgctgcagctattaattgcgtacctatgaatcatatagggccaaccaattatgactgctgcttttctttactttgcaagtgggagattaagggaatgaaaggaaaaaagaccactgccaaaccatctggctgtgtctacttgcacatgggttcttcctgaattaagtaaatagagaaaaaggtggcattctaaaaataaaccacttcaaattaggtttttaaaccacaaaatcaatttcacagtatttttaaagtttttctttctttttttttgtgtgtgtgtgacttcctttgatatgtagacaaatcattagttagtagttaatttaagacttgagtaaggtctagtttcttatgttttaataagcgatatattttattttttctgaaaggggaaaagataatgaaattgggttggaaagcctttaatacattggtactgatgtctccatcaaagaaaatagtaaataaagttctggaggccagacgtccaaaatctaggtgtttgcagagtttgttccctcctggaggctctgaggcgagtctattgtgtgcttctctcctattaatggcttttggtggctgctggcaacccttggcattctctggcttgtggctgcatgactcctgtctctgcctctgccttctcatggccttccctctggatctctggtctccagttgccctcccctttctcttataagggccctggtcattggatttagggcccaccctaaatccaggatgatctagtcttgagatccttaaattaattacattggcaaagattatatttccaaatatggtatattcacaggtactgggaattaggacttgaacatatctttttgggagacaccaatcaatccattacaatgataacatagggtcaaagctattaaataacttcccaaagaaggtcagagagtggcagaggtggagtatgaacccagattagtttgcctccaaagcccatacttgttcttctgagaacatgaccactgcttatacacacatatggcatgtatgggtaatgtattagaccattctcacactactataaagaactacctgagactgggtaatttatgaggaaagaagtttaattgactcacagttccataggttgtacaggaagcattgctgggaggcctcaggaaacttacgatcatggcagaaggctaagaggaagcaagcacatcttaccatggtggagcaggagagagagagcgagacagcacaaagggggaagtgccacatactttccaacaaccggatctcatgagaactcactattatgagaacagcaagggggaaatctaccccatgatccaatcacctcccaacaagttcctccctcaacactggggattacaattcaacatgagatttgggtggggacacagagtcaaactatatcaggtagcatgaccatctttgagaatacagagtctttaataggatgttgaccatttttatttttctgcctttataaaaaatttatactgtgttggaagtaattgaactgtgactatatgtcataattaatatagttgaattcatgttctttcaacagctccatcacatattggatagctctaggaaccccctttggatttggagatagtacataccagaaaccaatttgaaaagttcaaaaagttcaaaagtagagttaaaaacaaacacttttataacaaacctagattgtattgtattttttttccttcctttctctttctttctttctttctttagagatggggaagtagaacacctaatagccagtttgtactaacttgtctcatgttttgggttgtttggatacagtccaacacactaccaggagagctgcatcttgaagtggccagtgccacatgccattattctttccgtaggaggcagggcatgtgcaaactctgtgggcctgccaaggtcagatgtgtacattggaccagtcacttcaccactttaaatattactttcttcatatgttaggtgaggggagttgatttaggtgagttttaacttttctctttttctaccaataatatgtgcttttaaaagccccttccatcccaacacatacttgaatatttatagaaaattgtatattttacagtcatgttgtaaagaaagccattaatatatttttagaaaatatgttaacatatacagggattttattcctgtgttattcttacttaaggtaaattaagagatagacaggaattgccacgactgcagaagagcatatatagagtaagatacagttaggctcttatatatacaattttaaaagaattagaaataaaggatcatagaatctatattttggtaggaaaacaagttgaattaaactaaaaagccaattattggctcagttcaataatacattaaagaataatagcttcatttagttcccttacagtaatctctcttcaacctagcgcttcctttacatgaagctttacttttgaatataactttcactatgggaagaattttggttttcatatataaatctcaaatcattcctgttgagggccattagaaaaagaaaaaaaaagagattgggaagagaagcgagaagtcacatgctttgtagagcaggggaggaggtttggcaggaaaccaaaagggatggtcagagcaagtggcagcagagattcatgtcagggaagaggaagggatgtgcctcaggctgtgtctctggcacagacttgggaatcagtattgactctcaggcagagtggcactcatgtcagatgcaggactggaccaggacagagatgtcttcttattgtgatctttgaaagaaagctaagtgaatttgaaatatccggttgaaactgtagagaagaaagagcctaaggaggttctaacaagagagaaaaaagttattattcatttaattattacaaacttagggtagaaagagttcactgatgttgttatcttggttttgtgtactgtctttattttttattgctcagtcctttataagggcttgcatatatcctttccaagatttccctcttacctttgttcattccaaccttattctccctttaggagctaaggattatacccctggggtgtttaaattgaggagagactactacagtttctgttaggtttttaaacttcagctcagtttgtgtatgtagacagagccctaatctaagccatgtagcagagtgcctattatgtaatagatgttcaacaaactattgactggtcatggggtaccgaaaaaacaaaacaaacaaaacagaaaacaaaaaccaatgcccaaacaacaaaaacatttagcagctgatacaaataataccttcttccatgtacaatgctgtgttacatcttaccttaacctgggaacacgtataccattttcttttttttaattaaaaaaattttttttaaattttactttaagttccaggatacatgtgcagaacgtgcaggtttgttacataggtatacatgtgccatggtggtttgctgcacctatcaacctgtcatctaggttttaagccctgcatgcattagggatttgtcctaatgctcttcctccccttgcccaccacctgctgacaggccctggtgtgttttgttcccctccctgtgtccatgtgttctcattgttcaactcccacttatgagtgagaacatgtggtgtttggttttctgttcctgtgttagtttgctgaagatgatagcttccagtttcatccatgtgcctgcaaaggacatgatctcgttcttttttacggttgcatagtattccatggtgtatatgcaccaccttttctttatccagtctgtcattgatgggaatttgggttggttccacgtctttgctattgtaaatagtgctgcaataaacatgtgtgttcatgtgtagaatggcaatttattaaaaagtcaagaaacaacagatgctggtgaggctgtggagaaataggaacacgtttacaccattggtgggaatgtaaattagttcaaccattgtggaaggcagtgtggcgattcctcaaagatctagaaccagaaataccatttgacccagcaataccattactgggtatatacccaaagaagtatgcctttttctataaatgaaagtctgactttttaatcagttacttgtcactttgatgatgatgatgatggcagctaacatttattgggtgcatatgtgccaggcactgctttactcacattaagttagtatcacatttagccttgtaaacaattctagctgggataaccagttagtaaccagttaagtcactcaaaatagtcaaactatgtacaatcaaaataaagagcagcttctgaggtcaggagttcaagaccagcctggccaacatggtgaaaccccgtctctcctaaaaatacaaaaaaattatctgggtgtggtggcacatgcctgtaatcccagctacttgggaggttgaagcaggaggatcacttgaacccaggaggcagaggttgcagtgagccaagattgtgccactgcattccagcctgggtcacagagtgagactccatctcaaaataaataaataaataaaaatcaataaacagcagcttattgaaaactgattttttcccctcaagtatgcagatacttaaagtttaaaggaaatatccctgtaggaagaaaatgtacagatactgattaatggatggattgtaaaatataattatcttatataagggagattataagacagaataatttaagaatgttgtctgtactttctccatttgttaaaatataaaatgaacacattttatcatgttagaattgtgttttgattttattatttgtctggaattacttttaaattgaaatttcgtcaaataatgtttttccctccagagatagggtcttgctctgtcacccagagcaagtgtcacccaggctggagtgtagtggtgtgatcataactcactgtaaccttaaacacctgggtttcagcctcccaagtagctaggactacaggcacatactaccatgcccaactaattttaaacttttttgtagagacaggatcttcctatgttacccaggcctggtctagaactcctagcctcaagccgtcctctgcctcggcctcccaaagtgctggaactgcagacatgagccactgtgcccagtctcaaatacttttttttataagaagccagtgtattcctacatcaaataataaatatttgcttgcatttataagtcaggtggacaaggcatggaataatgacccattcaatggccagagccaataattggactctgtgatttggtttcttgatatttcctctctctacttgatttcctctttttcccttttctctaaatattaaaaaaataatgcacattttggtattcgtaactagttgttttctcaagttgaactatggttgagaatgatcccaatttcaaatatcccatgttgactttcggaaaatagagaaacatctaattgtggcactttacaagttcatattatcacagattccaagctgcctcaattgtcagtggaccattatggcttgcgtgtggtttatttggtttggagttgcttcaactttccaaagacatagtagatttgtaaaaacagatcattaatgataaccccagaatacttatgtctgaaatattgggtggatgcagcagttaggatatttttttttcctgctagttgtctgttctttaaaggcatggctgtttagttgccaccggattgaatgcttctgaagattagcctctcattgtttgaatgttttcataacattgttgccataaagcatcttcatacttcacagttgagatcttgacttccagaataaaaaagaagtcaggggctaatcataacaattagctaatgtgtcaacaattagcactttccatcaacctgctctaaaaggagactcttcttatccacttgcagacaaaaatgcaatgatgtagttaagaaaagcactgaaattggctcctagagtcccctgttgtagccaactaaatccccagggcattgtttacagtgattattctgccattatgatgttattgcataggcggaggggggagtcgtattgctcaaaataagtctgttcttttttttttttctagaagacaaaacaaaacattaaaagaaaacaatccctttttggctgcttttggaaaagtagaacaaaaactgctgtgaaaggtcagccagttatagtactttagtgtttaactggtaaatattttaaaaaagagtatatttaatattttaccacttggaaaactttcaatgcgttttaggtccagcacagctcaatcaatgtaagatttcagaggtctctggtggggatttctttacaatggatacattatattctgtggccatctatagcactgcttagtagaaatacgttttaacatcttttatataatccttctagtaatacaagaacatttatactacaccttttataaagaactgcacagtactttacacagacccatatatctatgtaaataccgtgggtttgtcttttaaaaagccttaaaacaacttgtaaatccccagtagcatctcagaattctgagggtaggaaaagttttaactaaaactgggatcacctttcgggcagttctgtgagtctttgcaggctactgtcaagagcacagaggatgctgggctgataagaggtgtgctggccaggacaatgcagcagagccagtgccaaggcctcgctcagtgaggtaggacggcttgaaaaggggcatccggaatggcagccagggctgttgccttagaacagggaaggtgaaagaggcactgagccgtcctgggccaccaactcttggcagggaaatttggggtcctgcatccatgctgtagatgacaagggagcacattcgagccatgcgcagagttggaaacaaatgccagcatcgggcttctgcaacaagcaaggctagtgaatcagcttcagtcagggcttctgagaggatctggagagctaagggtgggctttccaactgaggaagggttacaacaatgactctttctctctagcacttcagaaagtggttgctgtcaagatgtcatgcatatttgatagaaaagatgtgaaactgaaccattttttgttcaatttctgcaagaacagttctcagttctcaactaatctccctttgtgtgtttcatgatcaagttctaaaacattgcccctcatagtatagtcctagggcccacacaccaatatccccagggagtttgttagaaatacagattctcaggtctcaccccaaatcagggtttgcattttaataagactcccagcttattctaatgcacattacagtttgtggactgctgctctcaaagatgaaatagaatggattggttcatttatttttaaattcatatgatcagtaacatttattcaggatatgcactggaagaagatggtaccctgctcttgaagggctcccagtttagtgatggagacagatgtgtggaagagatgtgttcaaagtggtttgatgtgccaaggagtgtgcctaattctgcctgtggaactctcacaaggcttcatggaggttacatttgagtgttgagtctttataaggagtacaaatatgtttgagaggaaggaaaagtcttgcagcccatggaggtattacatgaaagcctgaaagaacatgaaatgtgcagaaaatgatgagatttcaagttactggaggccaaatgtgtgggtatattgcagcacctggggatgggcttaataaatgtagcaatgttttctgctccatctacatagtaggtgatcagtgaatacttgtgaaaagaatgaatgaaaaagaaaaaaaaagaggagagataggcaggatctgattatgaagctaatgaatgtgggctttattttaaaggcactagaagcttttaagcagggccatgacatggccacattgaacatggtggcagcaaagcaaatgatcaaagttaggggagactggaggcaaaaaatccagggaagagactgcagccctaatgcaggggagagataacacatgtctgaacaaaagtagtggcatttgggcatggagaacatgccaagttacaagatgtttagaaggcagaatgccagaactcctgcttggttgtgggagtgagggaaagggagaaaaaaatctcaggggtgtttattttctagttcaggtgaatggtgagaggtaacagcagaagaggaattggagaaagacatttaatctggttgggaatgcacccttttaggtgcctacagaacatctgggagatatccaagaggcagctggaaaatgaggcctgaagattcagatgtgggagtccttggcacaggaagagagagcgtacatgagaagagcagtgtgataaggacggaagtctggcatgcagacatttatgggacaaacagaggaggattcagccatgaagcaaaaagagctccaccagaggaaaataggaaggcagtttcagagtccttctttttacactcttgtagctcttcatttttcttcatagcacttaatgtagctatagttgcatacttgtgattattgatttgactgtagagggtagggggttttgtcacacaggatcttgaaggccctgttaagtacatggatctttattatgaggaccctgaggagtcactgatgggttttatataggaaagtgctgtggtctgatatacgtttttaaaagattactctggctactgggcagagcatggatcttgagggatcagctgggagctgttatagtatccaaagagaatagtctttgcactggggatagtggaaatggaaagaagtggaagaattcacaacatatttagggtacaaagttcttggtgaacatttgactgtggagatgagtgggtggtggtgacatttatgaacatagacagacactggaagaggatagcatggcaggaacatgttgagtttgatgtccaggaggagatgtcttagaagcagttgtcctggagctcagaagagactctaaaacataaggcagaggtaggaaatttgtggagcttggtggaggttcaaaggaaattttagaagttgaggtcctatggggaaggcctaaaggaatcagggctctttagtattaataaaatcttttgaggatacacaggcaaatgaatcataggcctctgagaggaaactagcacaatcagaatttgggttgatttgagtgaagattactcaacaaatccaccatggaagccttagatcaagtgaagttgctaaaacccatctgctaatatatttaaagaacaacgagctattctatattttcctggatagtctagtttcatatgtatatagaagaataaatgaagaggttgtttcaggtgccctctatttcttttttttttttggaatctataaaatatttatttcagtgaaaatgcaaattctgaaataaatgtctaatttacaggacttgagtcttctctgtgttataagtacatatataggactttcaaaggaggagtgaaggtacttttccctgattatgaaatgtaagaactctattcttctcttgctttgaacaaaatttgaatagggctcttttggtgggtggcaagagaatatagtttcaagcaccaccaactgattaatgtcactgcactcaccagtagttagttactcctgactttagatacagaacttcttcaacattacaagagaatcctagcctcaacatctactctgggaggaagaaatccattgctttgtagctgagtaagcataggctctgagagggatcatgatttgctaaatgtcacacagcagattgtgattcgaattcagttgacagaagactgtgatttgaattcagattgtgttgtactatagtttttttgagatttcaaaaatattaaatattacagtctctgttttgcaaactgaggatagggaatttgtagtcacttgctttcacttagtcatcagtcagaagtgaatctatgtccctctaacctgccatttatgaacaataaaagtgggtgtgatattttaagggattatccaatgaattagtgttgtcatagtgtggagagaattttgggttgtcacaaaaaaagtataccttgggcccaatccgaagaaagtaggtgaataattaggcaaaaattgaacacaccagttagaataaaagagaaagaaattcggcagtaagagattttatctgaagttttatttgactggaggcaagttacagctatgtgatggggacagagaagtggctgaatctcaatagagagttgccaagaataatggcttccagcactggctgcacattagaatcaactggggtgcttttaaccagcactgatgcctagaccccatctcagacaaattatgtcagaatttctaagggtaggaccccaggtatcattatttttttaaaaaatcccctcagataatgcaaatgtgaagccagagcctccaacaggttatacttctatagagtttgggggtaatcgttttataattataaaactaatagaagtaggtttataggttgtgaacaaccatgttgttaaatcccagtattatcaaccctgtcagccaagcctggccacctttgtactcaagttttatttttttactttgtttttaaagtaaaagaaaaaggcatttgtgataggatttgaattccttgggtaagtttttttttttttttaaatgttctgctgcatgtactatatcagtatatctaagatactcactttctggcctgttttccagcactgtatattaaaccagggctaaggggatgaccgttaaaattgtccagacctggaatacactaactttagcctgtcaattataacattggcaggttttgagggggaacctcactaacaaaaacttttgtcaacaaaaactacttatgagattagggagtttcaggatgaatctacttttatgtctctgatttcatttatctgggccggtgtataatcagaggatgtgtacgttgaggttcagggaaataaggtaaagttgtttgcttttgacccattctgaaatagccacccaatacatggtaaaatacaaagaggagcttactagtaagacatttctaatactaatggctatgctagagatacaggcagggttccccagcattccacagaatgaaactataactgcaggtacatttgtgggatgagtaatggaatcatacagtcattccagaggctgtcccatggggaaataattcttcttgttgggtaaagtttgaacagttctttcacattttagtattgaagtgtccagaaatatatgtgtgaaatgtcctgcccataggaattataaggggctaaatgttggaagatccagtggagagggtgtaggcatgggaattacaaagatctggattagaattttcattttgcccctcagtagttgtggggccttgggtgctagcaacaacttctcagagctgcagtttccccatctataaaataggaataagaacaacaaaaataatagtagcttacttttaggattgtgagattgaaaaataatgttagaaaaatcaattacaggcacatagttcctgtataaggtagtcactcaaatttgtgcctgctgctactatttattgtcattatcctctagatcatttctagtttggtaagtgttaaaattaaaaggagctgaggtcttgaagcatgaggttgggcaaggagaccctatccattgcaagtggccagttagatatcacagagcttgagtgtggattttcccctttggaagttgtcctgctactttgttttttaaacatctgctatcctcagaactctagctccactaatttttttctttttcttttttttttggaaagaggtcttatgacctagctaggtgtcagacatagtagctttgttccagattataggattcagtctcagggtctgcttgtactattcagggtctgctgaattaacgtccagaaagaaagaataagttgactataccccaggttattagtgggaagatgccaatgctgatcttaaaggaataccaaaaaaaaaaaaaaaaaaaaggagagacatttaacaaacagagctccaaatccactaacttttacaccagatatggtcctaatcctaaaataatactattttgctgtgtttatcaaaggcaagaccagttctagcaactcctgacctgggtttcactaaagaaggttggggtttgtcctacctctggaaattgctgtctggtttgtctcaggaaatcccagaaagaggacagaacaaggcaaggcacagaacaaggttcagtggtggctgaaccaggactcctgttatggtaccagaaggtgggtgattctaaacacatgggctgttattaaatgaaacagtagtgcatagcacagtctgaacagagtgagcactgtattagttgttattcttaacatgatattgggccttccatgtactggaaggtagtttctatatttgacatatatgatctcttttaattctcacaacaaccctattagacactgttatcatgggacccagagaggttaagtaacccaaaagtcacatagttacagctgttgacagtctgcttattctccattcatttgctcaatcaatatttattgagtgcctacgacatatcaggctcagttaggagctggggataaagcagtgaccaaagcagacacagttccttctccagtgagattataatccagatgggataggctataaataaaggaagaagttaacatatatcaggtggtggttagtgctgctgagaaaaatgaaggaggggagagagaaaaggggatgccacaaggctagggtagagagttctgtttcatacagtggtaaaggaaggcctttgtgttgagtgctttgctctggaacgactttaggatggggaagaggcccaggtggcacctagacatttgaaagtaagggctgaggctgcatgtctctacctatattttctttcatgtttgcctttcatggattttttttctatgtatctagaattaaatatagaactagggtgaaatatccctcaaaaatggtatgggagcaactattagaatgaataggactcttggggccaatgggatggaatgtctgtttctggtcaagaggattgattttgatactggaatagaatattcacatatatcttcccattgcctgactccaatgggtgcctaggctttcgcatcaagtgggacttggtgaggtggggatgtggatgcatattagttaaggtacaggctggcagcggcttagatagagggaggtaggcagttcagggaaagttggcccaggtttcagatccctctgtctgtggcttctccagctcctggagagttgtttctgcgttcaccagcaccaagtccctgttcctccttgagtgaaagagaaaggaaagaactggggacaacgacatttccctttcgggactaaatggagaggttgcccatgcaacttcctctcacagctgaaacttggtcacactccgaggtagcaggttcagagcacagattctggagtcagaccattggggttcacatcccagctcatcccagcacatcccacttgtacaagtggtctagcctttttgttcctcagtttcctcctctgtaaaatagggatggggagaatagcaccttgctcatgggatgaggattgcatgtgttagttggtagaggacctaagacagtggttggcaaatagtaagcactacgagtttgctcattatgtaaataattggccataccagactgcaggaaaaactggaaatgcagtttctacatgggtagccaagtgtcctgtcaaataaaagtcagtagggtttttttttaataaaaggaagaatggggggagtggatacaggacagtatgaccacataatttttatccaaaatgacacacttatgacagtgaaagatgccactaccactgattacactgggatactaagcgtaaacaggaactgtcctgggaaaatcagtatgtctgggtgctttatccagggggttattagctatctctaccagagcatatgtaattgaccaatttcccaaattttttatttaaaaatcttagtctgaaaagttgacttctatttttaggaatgagtagaaggacagatggaggggatgttaagtatttttcctatttgaattctaccacaaactacgtggcctcttggaaaagtatacagattaacaaaagaaaccttggttaaaagaggaaatacaaatcaatttttataagaaattcatagtgcatctgctgggtgcaggagaggaggcaaaaaaacagtggaagcactctaggtatctctggtagaaaaacagctttgattggtttttgatttgcattggcagggaaacctaaacgttagtcttcaaaaatcaaacatttctcaggtgtgagcaactttacttatttcatccccatcttttacaattttcttcaatattggtaaataaaatggattactatcaggctttaaaaactcttccttttgccaagttattctgaaataacttcttagactctaaagaaaattagccttgctctgggacttggagagagaggagccttcagtaagtaataaataacctatccaggttggaaagggaggtgaccacctacagcgtgaatcacaggcagaattcaaaaacctctgtgaggaacttaacccagcctgcattttctttttccttctcagagaactaataagtcgtgtcagataagaagaagcaagtgagaaatgaatatgaactccaggcccccaacgacataaggaaataaaaaaaaaaaaaaatcagcactgggtcattgataagaggaaaaaatcatagccaactgtgaaaattcatcctttaccttacacgtccccctccaaatagacccatgcatttcagcgaatggtaaataatgcttaaaatggcagaagctagagttgggaaaataagaaccaggtgttggaaagaaggaaaatcaaaaagaccatacattttccgtcaacagtccccaccataaatcgtagcaatgccaccatcacgacctggagcccgcagggaagagactgttgtaaaaatgataaatcagaattactacacaccaggtcttgataaaacaaagaaagttgattccggggtctgatatatatctataatcacagagaaacaaagcttgatcagtgaagggccaaatgtgaggaaacgtgaagttcaaaatctgatggctgcttaatattccaaccaagcagaacattggataatacagtggaaattgatgactcagtggcatcggctgcagcaaaatagagatatattacaaatttcttcacaagaatagggtgatatatatgccagtgcctgttcatcacatttttatgtattcttcatatctagaaacaaaagaggatatactgtctataccaccttcataaaatagggttaacgtattttctggggttttgttgttgttattccctttaagaagcaaaatccatgattctctttcagaaaaatgtctatgtgtaaaaatgaggtattgctggtgcatctcttaaatgactgtcctaattgcactcctgaaggactctcagattcagtatatttgtgtgtgcatgtggggtagggccgggtggggaagcaactgaggagccagcgatgtaaaaatcacactgagggcaacttggtgttcgattaagcagcttcaattagattcatgctggatttcacagaagcagtggtctaggtgctcccagggattttcagaggctatttataaggcagcatgttcccagaagtggagttgggaggtccttcagtcggaaattctgaacgtcttaattataaggggtcttagacaaagtgctcatctagcatggaatcctctgaccctgataagtccatgaaggagtcaggattatgggtctttgctcttctattttcctagctggtattgcttgttagcaattgacacccagtagcttagcatcaccattctaggttagagatttctagccagtgatttctatttcaatgtctgcatgacacctttgtctggcttgagagtggtggttctcaaagcgtgatccctgggccagcagcatcagcatcagccttacccaagtgaacttgttagaagtgcagattctcaggttccaccccagacacactgaatcagaaactctgagcatggggcagctcaccaaactgttttaacgagctctcatgcatgttaaagtttggtaacactggtctagggaaagtgggataacaattgctaagggcctctatgtgatttccaagctaggcttgtgatgtttattgttgtataatcacacttgagcttagaagtgatcaaaccactttaaggattaaaaaattggactcaaaactttaggaacttgcccaagatgatgcatccagcggagtggctaagtcaggattgtgaacccagatccttttgatctaaaacttgttatttctcctataccatgatgaccagctgtggctccaaatctgctcccaattggtacaaaagggaatccagttggttctgtaatgtttttagaattaatcccttcttcagaagtagattaataaagctatttttaggctttactgctatacaggctttattttcatgtgatttaagacttgtaaccatttgtgtggaagggtttggacccatgagtagtcattaactctcctgctgaaggtcaattttagcagaaaatgagaggtggcagatgtagaatattggagcgcacttgtaccaggagttaggaggcctgggttcaggtctttgtagtttgatggccatgtgactaagtcatttaatttcgctgaggttcaatatttttccatgtgtaaaatggggaaaaatgtcttgcctctctgatgaggttatggagagggtcatatgagagacagtggaaaaagatatcttgaaactccagagtatcctttaaatttagagttttgttactgttaatataatgaggagacaaggattcaggataaagttattcaccatcctcagtatcagggcttctcttcctctgcattggtttgtttatgctagagagatcaggagcctcatgaaacagttaagtgtgtctttggcagataaattaattgtattcaggaacagtgccaacccttataagtcataatggcactgagatagtttggtattgtgtatgatcaggaaatatagaactggtgaagagctgtcaggtttgcaggtgatgatggtgggaaggtatgtcagaccagggagctctaaactctagacaaaggctaatgatcagggatgggacccacactagaaaataggcaaagggtctgtctatctgaagtgctgacagctaggtgacatttaggtgtggtaacctgcaggagaggctcagtcatggcgaaattctacatctttgtcgtgcaggcaaaacatgactccctctatttgaaatcattttttttttttgctgcttatctgaattttcaataaatggtaggtaatatttttactattaaaactattactatgagtaaagtactgagataggtattacatggacattataccatttaacctttagactgaccttggcattttggagttattattctcatcacagaggaagaactgaggcccaagatggttaatcaattgccaagtctatagtcagtaagtagcagaactgggattgaaacattaggctgtctacgctcctcctctctctctctaccctgctgacaccccagtgcggcagacacccaagtggttgcagctatagagactagatccaagccctggtgcagctctgagggtggctctgaagcttcctggaatctcatttttagggcttcataggtggctgggagactccataattcctcttggacctggttgaccagctctgtcagttcacctctcacccctcaaatctatgctccacttatactaaattgctttgcatccctcaaacacataatgcgctttcatgaccctggccagttgctttttaaagtgtaacctgagatctacctccttgttaaagatgcacactccaggtccttgagttagaccaaaagaaagagaatctgtgagtaacacccaggaatttgcaatttaagaagtacccccaagtgattcatgtaaacatcaactgggaacctctgctcagccttatgtgctgtgctcccttcttagaaagccctccttgcctttctttctgtactccctgctttttctaccacttgaatagccttaagtgctaccttggatgtcacctgttttgtgaaattttctaggttcttccccagcagagttagcaatccccatgtttgttcttcataccaatttgtttctgcctctgctataacccctatcatattgtactgtacttaaaatatgtatgtccttttttctactttgagttatttgagagcagagactgtgtcctatttattctaattcttctctccagtgcccaacacagtgtctgacatggggcaatatcctccaaatggttgcatggaagaagatgaagagaaggcaggcccagtcccagaggaacttgggtgctggaccagtacaaagcagggaatctatttacttgctttgggcatgctgggtctttattctaaggggtgaggttagcactcagttactaaaacaaacgaacaaagaaaagtcatgaaaatcaggcccagctagcacctggcttaggacttttcaaattcttcgttgctgtgatttggaattgttcttagatctacaggtggatctcatccttactaaccaattttgaaatgctggggagtggggatgtcaaactggctgttacttcagcttctttgtattgggcttgtggtggtaaatgctacaggatatggatatgggaagccttggcaattgttagcaagctaaacgggagagttgtttcaaatgtggagataccatcaagctattttcatggatgcagtttgctctggaagaataggggaaggtccctcaatcaaattgttgatagaagatcaaaactattattgtcctgctggttttcatgactcaaaacctttcaagaaatgtatttctgggttttaaccaaggttgcacagctggtaggagttctgatgtgatagtccctggtggattgtgagcttattagaccctgtggctttgattctctggcagctccttcctttgactggggctaggagacccagcagctgaagtggtgtctggattcagggaatgtcaattgattttttttaaaggccttatttttaatttttattcaatcactttatttctagaacctcccttttttaaaaaactgtgtttgccacattataaattctcctacagcaattcaaatgggaaaaaagtgaggtttggatttttaaaaagtgtttttgtttatttaagagatgctcttaaagattatttgttgttttagtcaagttccaacaacgaatgttagaggtaccagagaaagccatagaattccccttcctggataacttgtttctgctcttgtttgcctgcaaatgttttaagattttccagggtggttgtttctatttaaggcacatcatctgtggaattctgaaacgcaaaccagttctttgaaagttttgataaatctaactttttaataataggagagtttcaaatgcctttacagccacttggccatctgtaaataaatgaagttcaatgaagaaagtagcataaggaagctgtttcagttactatttccattttattcattcacatcatcagatttcaagatgacaaatatggaaagaatgtgagaatactcctttttaaaaaaatattatgttttgaaacttggatctgagttcaaacactcaatttaaaggagacttatgattcaaatgtgagttatttattatctttgtcaatttccagaatttaaatttatgttgggataaagcaaatgcaagctacacttgaacaacaatggggcacattcttctctttgatttactcattcttcaagtagaggctcttatgttctatgtttgagactatgggcacttaatcctgggtagacatggatattagagtctcagcttattattgtatcccgatgtcctctcttgtatatatgtttgatcattgggttacatttatatcatctgaaatggaagtgattctgatttacaactcaaaatttgcctaagccaaatggtgaacatttcattatttccgttttatgggtcatgtctgaaggggtttggctcagaaaatagaccactgctcgaaaggaggaagtctgttcccatgaggcagtaggtatggagtcagcaaatcatggcacgttcacccccagagtgtcagggaaaccatttgttgcagccgccaaagtcaacccatcccactggcatgcacacgcctaagtatgcacatcaaacttctatagacagacagatgacacagttagcaaagtcctaccaaagaagagagagagcccgtatcacagtggtggagtgaagctgtgacccaggctcctgtgttttttccttgctttctctctctcacatatctttttccagtgccaatagcaatacagattgcaaataaagagagaggagcaagcagaatgtgagtgtgtgtgtctgtgtgtgtgtcttctctaaccataggccctcagagctttattcaatctctggcacaatgcagcctctgtagaaaagatattaggaacaaaaaacaaacatgaagatttgggagcaggctgccagaattattaagaaaaacattcagatgatgccattaaaaacatatggggattctataaagccctgaaaagaaaatgtttaattatgcaccgtatgtaaaagccatcacgtttagattaatactaaagactgaaactgcgtggggcttaagtagtccatagtgatgcatcaatctctttactcctttaaaaataatgtttttcttttgctgatgacaaatacctttcaaactgttgagatcatgctgctatagtgatacatggagtttaatgaagtccaaagtcactaacgaaagtttccgaattaacttttcaaggttgttgagttagatttctttcttttctttttctcctataccattcctgctcacttccctctgctaacaggaattcctcctccccctccttctccaacatacaaaggttgcctatgctggtggccagcataagagcctggtaggttggttcgaaatatccagttttgagaaggttttccattttaagaaactgtaatgatccattgcttcacttttaagtgttaatagttacagtgactttgatttccattcttaacagctcacattagaagcctgaagaaatacgaaactcgtctctttttaataaatacagaaccagttttctttcatctgactgtgatgtgttttaggatcaccaacatttcctttaggtctttgcaaatgtgtagaatcattattttatatagctttgagtgtgtgaggagtggcacaacaagaaaaaaaaataaacctttgtaatgaatagggcttccaaacaagcatactgacatgctctgggtaaatataagtcaaaattgcaaaaagtagtcagggcttagttacctgagtactgcactcacatattcatacaagtttaaacattgaaaagttgatttgtggcttctcagaattaaaaaaaaatagggtacagatacaaaaaaataaaacaaattgtatagaaatgagaataatataagcaggctgtgcatttatttgaaaatctttactcatcttaagaaggtcaaaatgtgttctgctgacactatttcactttagggaattttatggacttaagcacttgaaattttgatcctcatttattggaccaggcttctttaagtaaacatgtggtttatgaatcagtggacagatttgttgctcacacttgaatgtgtcaaaacgttttcctaagtgtcagtaggcctcattgcaataaaaatgtcaaactcctcccacctccttcatgtctgtcattttgtatattatatatatgattgaaagttacaaatgaccaaaactgatctttttaatacaaatggcactgtccaggaacctgactggcttactcaaacgcctatctggaaaaaggctctccgacggcccaacgttgaggtttttcaattcaacattgaacatagaagggttatttcaaatccaatctaattctcggtgatggaatcctgagtcaactattgtttcagtgttttcctccagtgcatttgtttttgtgtgagaaaactttactgctattggttagtatccagctactttttttttttccttcaagatggggttttcgctcttatgcccaggctggagtgcagtggcatgatctcggctcactgcaacttcacctcctgggttcaagcgattctcctgcctcagcctccagagtagctgggattacaggtgcccaccaccacgtctggctaatttttgtgtttttagtagagatggggttttgccatgttggccaggctggtctcaaactcctgacctcaggcgatccacccgcctcggcctcccaaagtgctaggattacaggcgtgagccatcacgcccggctgcatccagccaccttttacaaagagccacctgtttctgagtttacacaggatatgttggatttatgtaatacagtaagatcaatttaatatgcttttccttaagtagaatgctacctggaattacttcactacctgatacgtgctctctttttggagacaaaaaacaaaaccaaacaaaacatgtcaaccctgacttaagttagctttaaggtatttcattactccaatttcttctaatatgcattaaaggctatatactctcagtatgaaaaaatagctgtcctgaactccctacagtccctgttatttacaatgtttcaaagctttagaattactacgaaagatttactcacatagcagagcatgtaaaatttaaaatcaataaagtatataaattttgcttgtctccttgaattgattccttactctaatagctcaatactgtaatactatatacttttttatttccaatgtcattacccaataataatctctggactttcttgccaccgctctggagcagtttggaatttctgacaatattcttcacaggcagttttcataggcaattattactcattgcacagcttctaaaaatgaataaacagatgagaaacataagtttgtttctgtgatattagaaactccgttatttcttgatatggtaaatatagcttagtatttgattttgaggaagattagagaaagatttgaatttggaatatcttatcagggacagattaatctcacaatatgtcttttttttttttaaacaagtatgcagtttagttttctataattttctaacctaagagttcttcaggctatagcattgcttggagatggaaaataagacagctaatgttgagaaggttaacattttatttctgatactcattttttaattctctgacagtattcacaaggataaattcaatctcattacagaacttactagtgttttgcagaatgaaacgaagctctccttaatggatttagaaataaagatagtccaaattaaagcaagagaggccatgagcaattactccaccacttacccttaaattcagtagggttgttgtttacttaaatcatggtggtatctgggtcccagtgctaaaaggattgagctgaccttggtttcttgaaatgcaaaatgtcaaatccaaacatgctgttgaaatctaaacttgctttcatttcttaatggccactcttagcctgtgaagaacatagactgatgattgcttacttaggcgtgaaaacagaaaagagtgtccatgcttgcaccaggtatttctacttgctaaagcagccctttctagccaatctctttaattcttccttttttaagtttgtttagtgtagtgattgacagagtcctctgcaaactgtcagaggatcttgatttgaatcccagctcttttatttcgcaactctttaacacagagtctacacttgtaaagtgaggattaaagactttggtcctacctcacaggaaagttgtaaagtaaggaccctgtacacattaaaaagtttagtttccacattcctatattctcttccacctgggctaatatttagttccaagagagaaatttcttattgataggttcagggataagatgccagataaaattcagaatgcccagttaaatttgaatttaaaataaacagcaaatatatatatatatatatatatatatttattcatatacatacatgtatgtgtatatatttattcatatacaggtatgtatgtgtatgtgcgtgtatatatgtgtgtatatatacacacatatatatattacactaatatatatacacatatatatgcatatacaggtatgtatatgtgtatatatgtgtgtatatacacacacatgcatacacgtacatacctgtatatgcatatatatatgtgtgtatatatataatagaaggtatgtctcatgcaatatttgggatatacttgtattgaaaaattacttgtttattgaagaatcaaatttaactgggccctgtatttttatttgctaatttggcaacttaggggttctggttaaaaaacatttcttacattgcatagataataaacagcctaaagaagtttgggaatggttacacaggggcccttcatgcttccatgtcagtgcctaagtacttaacccgatgtggtagttgtgagcatctgttctttcattaagcacatttgcagtacagaacccagtatgtaatttgtaaaagcacaaattaagcctatcttcctctctctccagagagaagttctctcttaggaaaaaaaaaaaaaattacctgcagtagtgagttttcatggcgaatatcttctggaatgccattggcatgcactgattcttcttgaggatcctctctcccaaccagcagaaccaggttgtaaaatctggagaaactgcttgaaaggactaggcttctctttataggccccagaagggaggacagaggcacttcccaagaccctttattgtcctttgcctccagtacccaagtgtttgtgtggctcctgctggtgttttgctgagcctgtctggaagggcaaattgcttttggatgcatttctacttaatatattcatcatcacattttgtttgttcattttctataaaaagaaaagataaaagatctccactgggctgaccttaattttaatttttcaaagtgatgacattacaaaaatcatctataacatgatgtcatactcgtctcctgacatctgttatgttggggaagtcttgcaaacacagctaatcaggattgtctatttttaagtcttcagatgctggatctggcactaaatactggttctttacaagtgtgtacaggtatggggtaaattgtgtaaatcaattactaaaaacattcactacttcagagcactacttataaaatctggccaagtgccaggtggttgtcacacacatcagaagattgattatctacctaactattctttttggtttcttttaccataatgagttacacacaccatccatgtctattccttatactgttaccttacattgttttctcacatttacatccatatgatcacatataatcttttctaaatgcccaggactaatatacctggattagtgctgatgccgagatcacctggtcgtggctgagtgggtctagagagatctggcttacttttctgaggtcacttatcatacattggctcttaagagtttaaacctactgtgctttaaagctgtaggtttgctcactatgaaccaaggcagaaggatgctaagtctgttattatatcaataatgggtctgatatagactgaggattcatattaactccacatgcctccaaaaaggcaacctagagtcatgactaatacatggaaattggtgcctccacccgcagctgaccctttggtctcttaagaaaagaaactagaactttttaaggtctgagatcaagatcttactttttttgtttagtaagtatttagcaaatatttttgaaataattttccatgagaagcatgaacatgagctacatgattgagtaaggatgtaattgtagcttccacttgcctctcaacatggaaatgctagaagttttacttacagggttcaaaaacatgtatacagtcatccctctgtatctgtgaaggattgattccaggacccttcacggataccaaaatctgcagatgctcaagtctctgacataaaatggcatagcatttgcatataacttatgcatattctcctatatactttaaattatctctagattacttatattacctaatacaatgtaaatagttcttttactgtattgtttagggaataacaacaaaaaaaaattctgtacttattcaaggcagacacattttttcctcctaatagctttgacctgtggttgtttgaatccacagatatggaacccacggatatgaatagccgactgcattaaggtgctacctggagcagtgtttctcaaacttgagtgtgcattagaatccctggagttcttactaaaacagattcctgggtctgaccaacagagtttctcattcagtaggtttggtaaagagcccaagaacatacatttctaacaagctcccaagtgattccaatgctgcactggtctgatccacacatctcagaccactgaccttcacacctctggagacactagggcatctggagatggatgagaacattttgggttaaccacatgaaatggaactttaaagtctctcctccaatgaaaaagtacatgctgtgggctctgtctggccttctttttcttgggaatggacaccaaaaagtaaaggcagcctttcctcttggataagagatgatcatgttcaaatcacagtgagcatttaccaatcacttcttaaaggacagaaatacaaaaataatcaagacacttaccctgagcttggtaagctcaaagtgcagggtctcaaaagctgtaaggagtagggaagtttacaagctatgaacgaagagatagtcctgctgtttttgaccctctggccccagaactctggacccaaccagcctaggtctttgatactcacccaagctgttctgccacagtggtctttggtacttctgtgtcatccctccagcctcacctatcttctccgagttgaccccattgcctctggcactcttactagtaatattaatgatcaatattgtccttcccatttattgagcttcatctatatgacagaccttgtgtatatgctttaatttcacagcaactcaaaaaaattgggtgattttatctcgctgaacatattggcaaactgaggcccagagtgattaaatgatctggccacagccatgcaattggggtgggtgcagagctggactttaaagcttgttttgctacacatctgagccactaagtcacacactcttagcacttttccacatagccatttttttttgagattaagattttaagtttttataaaaatggctagaaaatagggtaacacaattcattaaatagtgacctgtgtttgtatttaataacatggaagaataaggataaaagaaccaaaatgagaaatgagataatccaagaaaataatggcatttcatttttgaaagcattacatacttaccaaggtgtaccagagcttctgtattaatgacattaattctgtcttaatgatctcaaaacccttgaaagtaagatccatattaatgttactaaatgggaaagatagcctccatcccctttttgtgaggacattggagcttagagaggatgtggctcaagaaaatggcggaacaagagctagagttcagatccttggtgctcattacattgtcctggaagtccaaggatgagggaggttgggaagggtgggaaaattagtatttcatcaggacacttgtgtttgcaaaagaaaaatgcccaattcaaatttacttatgaaaaataaaagacaaagattttactggagaagtaactgggagtttcagggaacatttggcttcagcaatgttgaatttagggattcagtaatgtcattaagactcagactctctttctatcttgttctatcttgttcttttgctttcttccatgttggttacattctcagatcatctctcttcttactgtggttctgggcagctccaaactaataagaaaagcttttctctttcccagtgatttccacagaagtcccgaatgtagactttggcctggcttgggtcgtgtgcctaaccttgaaccagttgctgtggtcaagggatgaaatgcttctattggccaggcataggccatgtgctctttgttgtagtctggggtgagacaggatggagtcaaccccacctgaacaacatgcctgaatgggcaagggggggttatctaaaggaaaatggctgttgttgccagaagattggagaatggatgctgagcagtcaaaaatcaagagcatttgttttagtgagcaactaaacaaatgggcaaaggagtcttcctgaggttttgcctttaaaaattcaaattgccttgtggtatgtttcatctgattcagtgggtggttgttggggcaagaggccatgctcgttctgccttcctcatcttttaagatgggctcctcctaaaagcaaagtctttgccaagagccagatactgaattgggcattttacatagtacaaaccacagtatcacaaccacactgtttgtggaactactttgtattcctgacattgaagagtagtgaattaccatctaatttgattgtgactatacatagctgttcatttacatacaattttgtgtatttaaatgggttccattcagccagtagttccatgtcaaagttcatatatctttgatacacaccagtttaatgtctcaagggttaaatggctgaggtcttcacaaagtctcacattatcagtctctgtctataaaatgaagggctggatgagattcattctaagatttactcaaagtccaatataatatgattctatagttttaaggttctggatagatcatagcagttgtttttcaaactggacaaatatttttctacttttaaaaatatgccttgattctacacagagagaagcattctcatttatttaaaaatttgttgtagaaaggaaacagaaaagtcaagtaattgttactctggttgtcaaattcaagatggaatttgtattagtcctttttcatgctgctggtaaagacatatctgagactgggcaatttatgaaagaaagaggtttaatggacttaccattccacatggctggggaggcctcaaatcatggcagaaggcaaggaggagcaagtcatgtcttacatgaatggcagcagacaaagagagagagagcttgtgcagggaagctcccatttttaaagccatcagatcttatgagactgatctcactatcatgagaacagcgcagaaaagacctgtctccataattcaatcacctcccataaggttcctcccatgacacatgggaattgtgggagttacaattcaagatgagatttgggtggggcagccaaaccatattagagctattcttagaattattatgagaatctgtaaaatgtgaagctggcaaggaaacaagcaaacaaacaaacaagcaaaaaactggggtaaagtgaaatatacagtacatatagttttatatatatgaagctttgaatttatgggagctgggttgccattggctaccatgattcttaatatggtgcccagactcaacaatgagtccagttgccagaattggaggttagattcataatcccaggaaaaaatgctgctaaactttattttaaaaagcatttttaggagaatgcttttggctagccgacatcttattgctccccttcccccaggaatctaagtgcctttaaattaaattggagaacaccagtactatacctgtcaactgttttcttttcttttctttttttttttgagatggagtctcactctgtcgcccaggctggagtgcagtggtgcgatctcggctcactgcaagctccgcctcccgggttcgcaccattctcctgcctcagcctcccaagtagctggaaccacaggcgcctgccatcacgcccgtccaattttttgtattttcagtaaagacggggtatcaccatgttagccaggatggtctcgatctcctgaccttgtgatcagcccgccttggcctcccaaagtgctgggattacaggcgtgagccatagcgcccggccctgtcaactgttttcttaacataattttaattaaatagctatgcacaatttgatgtttagtgtctgacttctctgttggaatgtaaattccttgagtgcaaatgctatttctcgatttacttattttttctctctttttttgaactcaaatgtgtctgaatatttttaagttactgaatctctagtacctaccacagttcctgactgaatcaatggatggaaatccttgggctttcactggtctcttcttgttttgggagtgtctttgtgagaaacatagctgccatcaattctggcttaggggttcttctactgtaatgtttagaaaatagcagtcattctagaggttttttttgcataagattatcgaaaaactttagggttcagggtatgttttaggctgagttgaagagaaaaatagtctattagaaatagtctaatgcataagccctagaggacatttccttccctgctccctcttataggacaagctagcaatatcttttttccccttatagtctaaaacgtctacatgcttaggcacatattggataagtcttcacaaaattcagagatacaatctgcttaaaagtagtaagaaaattaccatgcttagataaatctattaccttacaaaggaaactagaagatcataagcccaactattgagaatttctacttgaaatctaacagctaggcaagattctttagctccattccctccccatgccaaaaagctcatctggaagtagtcaacaagatttaagaggtggtggtggcccctttatcatccacttcttggtctccctggagcttcctgcccggggaatgatgatggtaattgctttttgttgttgttgttgttgtatgatccatggaattttaggtgttttttgatcaccaatggatttcatctataatattatccatgatgacaatagattactttcaactgactgaattgatcagtgacctgaaaggaaagttcctattgctcatgccacaaagtatatgatttcctaccatccacatggacctttttcgtttgcctgcatgttgcaatatttattgtcgttgcttaggttttttaaatttaggttatgatttcaatgctttgactggtcagaagcaactagcattcgttttcctctgtgggtctgcccttaaaaaatggacctaaggaaaatatgaattccccaggaagacgctcatatctatttgactttggaaacacagataaaactattgcaaatcctgcaaacatgtgatggaagagaatctatagcagataattaagagctgggttctggaattggaaagacccaagctaaaatcttgggtctgtcacatgtggtcatggtactgagggtaagttgtttgacagccctgagtctccgagtcaagagaatgcacgctttgcacagggctttggttacacagtagtaaatggtctatagatgttaccttaaaaaaaagaacattcttttattgctaaaaatttacagataactaaaagatcttgaaaaaaatgggagaaattgagtacgctattcatagtataagcaatgagatatgatctatgtagaaggaaaatagagttatatctgaaacagattgctttcttgtttaaagatactcttaatttttgttgagggtcagtttaggtaatgtcgtatgaaaacttttcacgtattttctatcaaatagtggtagaaaacattatccaatatcttactcagagtctcctaaacaacaatccatagaagtcctttttattagataatgagaattatatatgacatacttcttttccttttcaccttgtttttcatgaagttgaacattaaattcagtgctcaaatgaccatattgtcaaggtttcgagtttttttccttaaatacttctcatgagttttggacttctatttgactagtcatagtgtttatgtgtattttatcttgagatgcctgaattattttgggaagaaggaagttagattatttaagagatgcttcctagagcttgtccataatgtttcagcattttccccccagtcagatgaataaaaaaattggtatttgaaaaatgctttgaactctttcagtggaaaagtactatgcaatgttaatacatgttgaatgttaatatatgtaaaatttatttttataagtacaagtaaatcttgcaagatatttttacaaagatgcttccctctgtagtatgtggtggaatgagagacttctaaaatgtttgtcactttgtgatatttaggtgtcttcaaattttaatcttttgagcttaaattgttaggcccatatatacaaaggacttcatctgaaaatgatgcctactttgaatgcagatgatgatgcctcctgtgtaactcattctcttctggaatctcagcttcgatagggcccaggaggtagtatggtatggtgaaaaaaaattctcatgttttaaagtcagacaaaccaaggttcagatcctaactccattacctgctaaatagattagctttaattatctccccagtaaaatggtgataataatatttactttatatgtctgtactgaatatttacgttgtaccaataaatgatgactgctatttgcctaggctgctggccccacaggagttggctagctccaagttgctcagaaacatgggcagacacaatggagtgagtgagttgggattgtcataggagtataaaataatattgttccttaggatctggcctatggtacaatcccataccagatccctcttttttcccctcatgtgctctctacctgcaagcaggaccacaggagagctgctgctgtgctgtggcgaaatgaaaggtgaggctggatctgttgggtgggagctccgcttggagctccctactgtcattctcagaaggcaactgctctctcagttgttggatgtgggtggaactgctgaggacagtcttgatctgctgcttcttcttttaatgcagaattatccagtactgtgtctaccgggattctaaaaagtttttgattgttgaccagtaaggcagaaaattatcttgcttatttctatttactttctgagttgaattgtatattgttggtaagttgatttaaaactatactggctctcagatattataaagggattgttttaaagcgtgacacataggagaacccaagacaatatttggacccttgaacccattcaggggttatttactcattccgtgaacattcatcgggcatctgctatgtggctggtatttaaggtgctgaggaaaggagaatgaggacagcaactgtcctatcgcatgcaagagacatttttacaatcaaatctagcactgtttaaaattgaaaattatcttgctttagaaccagatgcctgaatgaaaggaaaggttttggcattcaaggcttcagtagtcagtgtggtcacagttgatcctccattcaccttgattcctttttagtgagtgctgaggatttctgcttaattatacatcctcaaaacctcttctttcacatgcttccaactccttatagaccaaaaaccttttagtcgccgactccctctgtcccccaaccattcaccactgaacaaataaggcagaatgagtgtggaaaaacaagttattttgtaaaacgatgtctctctctctcttttttttttgactctgtgcttaagaactgtaaaaatgttgcttgtgttagtgtgtcttttcctacttagaaaagatctcttgcacttgaattaaacagcttgttgtaagcatattaggaattctggagttcacttaagcactggacattttcacactcaaaaatgtaaaggtatgtgctagattaccgacatggttttcttatgaccatctcaactcctttccccctaaaattagatttctttttggtttggggtagtaaagtatgtgcacacccttgtagaacaattgtgaaatattaggtctgtatttctggatgcactagccactgatgtaatccaattctgatgggagagtaagttgtgcctatgactggcattacaaatgcagagaaagtaaaatgatctcctgaaaaaaagagcaggcagttatttttcagtggtgggaagaggttgcaggtgtgcctggtgtttttaaagctctcaattattgatcttgtcctaagacttacaaatagaaccattaatgtgtcagtgtgacccagataacagatgattattgtccatctttaaattgtacttagtactaaaatatatatgtaatgcatgcaaaaaggccagctttatcacacctcctcaaggttttaaaggaaagaattcatttttttcatttatttttctctctgcctttctccctcctcctctacctctacccgctgcatttatttcctctgctaattgatagaaattccggactgagcattccagccactggctggcagacacaaaaaggacacaacttacagttctgcaatggaaacatcttaaagcacaactttttaaactattagtaactattgccttctgaactatgcagctcatcacagtgagtgaagcaagttaaaggactataacacccagggattttagttcaatttcactctaacctcaattttattaccgtaagtccagtttgtcatcagagagctccacatcacacttgatgggcagattcatctgccttcactgtgtgcatgtggttgatgcatgaacagcaaggcagtaatacatctatttaaaccaagccttggaatctgtcccaaatgacataatctgccataagctgggaaatctggtctagaccacagaatgttatggggtgcacacctgttcagagaatcatcatcaaaaggtagttaacagcatttcattgtcatcccggggaaacaaaataagtcacatttggcaggagttggacccgggcctagagctacttgacatttttatataacaaattagaatagttgatagaattgtcacaaaggatctgtttttaaggtaagattgaagcactaatttttgtacagagcttctgtctgtgcccagccatgattaggagggattaggtggagaaactaaagttgatatagcaaccctggtttctagtaagtcagactcctggtgatgaaagtgttgaggatggagatggccctgcaggaagaagtgggaagggggagctgggatgctgtggagatggccctgcaggaagaagtgggaagggggagctgggatgctgtggagaaagatagacaagacttcgtgatttcaccaagtttattcattcattgattcattaattgattctttcatcagatattataagtgcctactatgttccaggttctgtggcaggcactttggacaaaacagttaacaagatgtagttggtcactatggggaagtagctagggctgagaaaggaccctctgaagtaaatattgggcatgaggagaacggtgtttcttctatccaagatgggaggactgggagaaggaccctggaggagatttgttcttacgcttactgcatttgagttaacattgtgctatagatgcctctcacagagatgaggaagaaagagatgtgaggagatagggctaagtctgaacaattcagagttgtccactggtggcaagaaatcaaaaatctgggaacagaggaaatttcttgggagcgttagtaagtaggaggcctggaagtaagtcttggccttggcctcagggtatggtagggtggttgggggatgagggaggagctagagactgaaggagataaatttcaaaaagtgttaattcacctggaactcagttgcacaagctgtgcatttagggagatggcctgtcgaacagattgcaactaactggacccagataagaaaatgacctggacctagcacaatacaagcctcaatactgtggaagaaacaaatgaggcccaagcagttaaataaattatctactgagtgcttttgtgtgccctatgggaatttcaagacttagaggagtgtgtccagaaaagaacatttaaagcaatttacatgttggcagacaggaacttataagatgaaaagaatctaagttatttagttgggagagaaggctgatgggggaaattatagaaattgttaaacagatgtctagtaaatagatgtcagcttctgtaagaatactttaaaaaaaatttttttttgtgctttttttttttaagacagagtctaactctgttgcccagactggagtgcagtggcacgatctcggctcactacaacctccgcctcctgggttcaagcaattctagtgcctcagcctcccaagttgagtagctgggactacaagcgcccaccatcacacccagctaattttcgtatttttaaagaagagacggggttttgccatgttggccgggctggtcttgaactcccggcctcaagtgatctgcccacctcggcctcccaaagtgctgggactacaggcatgagccactgcacctggcctaaaaatactttttaaaaaaggtttaatttcccaagtatgggaagaatcctagattagggggagagaattttggttttagcctgaactttccaccactgtgctgtaagattcagttaggttaaatacttcgacctcattgagccactgtcttcccatttgtaaaatatagagatttggcagatgatcactaagatcataacctaaagaaaagaatgggttgtatgtgatagtaattactgttttaacttactgaaattcaaagaaacctgagtctgattaatttgaatgcaagtctgatgtgatacctacaaattcagcatataaaatgaatctaaagagtgctttgcttaagaaaaatctgcttagctgctcattgaccctaatataaaaacatttgaaaataataagatttaaaaagtaaggccaagtatagtaattcaaacttgcttgtcatctttaaaacaggtccctattttaacaggggttgggtggtggtggttgctgttttttaacgctttgaattagtttcttgattcagtggcaaagggtgatgattgttcttcctattgaaagaggtttttaccaacacctttgccatgtctgccctcaggggatttaagataagtagcaccaagttggccctctaaatttgcccccctctccctgccacagcatttagcagattggatgaaaatgtgtccgcagagattagatattccagtgaccacactgcatttttctgctctgaaagctatctctcggatcagccctctacctctggtttatcgggaggagagtatagacagataacatccttgcgatgtgaccctgacctttgtcaacctttgttaatgcttcatctgaagtcaggcctaatgtttgtaaacaggatataattaaggctgggaactgacagggtctgacattaagacaatgcagagttggcagggaatggcctgtgagatgtcagctcgcattgtgttctaagtgccttcataataattagtgtcctctgtctgaaggaagttcactcaacttggattaatctgtcacagcatggaggccatccttgggagggcaagtgtttcctctgataaaccttagaacaagtatgagaaaaaagcaaagaggctcaaaagaaaactgtgaaagtcaagactgctggtgacaggtgctgcctgaaaattagaaacaggaaataaggggggtggggggacactccctccctgcccccgacccttcacatcccaatcacagagtgaatgcaggagtttacagtgatgagaatcgattacagtgatcccagccctcctgatctggatgccgtgagtagacacaggactgtaagtgttcagaaaagcttgtgcatatacacattgcttggcttttgccttaactggcacggtgcacgtgtctgagattgcccccaccctataagaggattttggtttaacatgtaattgatccaaagagactgaatctgctttctgttatcagaggacatttgtttgagcatctgctggtagttggtgtggtacaaagtgagtcaagagatgcgtaagcctgatgctgaccggctgcctttgagtcggcttggactcttcctgaatcgcaaagcaggcagagaaagcagagactcaaacggatactctacaccagtgttcatagcagcacgattcacaatggtcgaaaggtgcaaacaacctaaatgcccattggcagatgagcagataaacaaagtgtggtgtaaacatacaaaaggaatattattcagtcttaacaaggacagaaattctgacacatgatacaacatgggtgaaccttagaacattatgctaagggatataagccagagacaaaagaacaaataatgcatggttccactttcatgagaggcctagaataggcaaattcacagagacagaaagtagaacagtggttaccaggggcaggaggaaatgggggaggaggcaggaggaaatgcagagttattgggtacagagtttcagtttgggatcattaaaaagccctggagatgagtaatggtgatggtcgtacaacagtgtgaaggtacttaatgtcactgaactatacacttaaaaatggttaaaatggtaaattttatcttatatatgttttaccacgatcaaaaaattttttgaagtggtgatagaaaaatagatttttcaagctagatgagccttcagagcttctgaacatcaatcatcacatcagggaagtgacaggatttatccagggtcacaccaggagctgctggtggagcctgctcctgacaaatgggccattcacttttaacaccaagttctagtcttagacagggaaccttttctactgagcttttggggaagatgaagccctgaggcacattaatagcaggtctcttcggcatttatcttagtgtagagtttagtcattgttccttgaatttgtttgtatttagcaactttaaaggcctatatttgcataagactctttaggtctctttcaactccagaacttgatatttcatgattgtatataggcaggatgactatagcgtcacacttattttgtaactaagaataagacgaatatgtttaactaaggcattgaatttttccactgggttaagtaattgttttaaaaacctcttgtcagtgagaaataaaagaagccatgtaatagttcccagtagaatgatcagaaaggaatgttacatcaaagaggcaacaactttgaatacgtaccttaggaaagtatctattttaggaaaaaaataattttattttattatttttctagttgcatagccttcttgcatcaggagatggtgctgctcatatgagaatagtttcttatcattaccacacttatttcactgtcaccaaacttatttacaggattgacaggctgggtaagaagagtctcacaaaaaatgtgtttgtgcatgtgtgtgtgtgtgagtgtgtatgtgtgtttactcttcttttgtattagatattaacatcctgaggcaaattttcagaagcttaaactttagaaaataactcttttgtctttttttttttgcactcccacctttctatagaagcaaatttcctatcaaattcctttttgtgtcattcaccagtttactgtgtcccaccctattcccatgccagattttacagcggttaaaacaattaatggcacatgctcagtgatgaagtgtagggataggagaaaatagagaatactcaacaaaataattgtgggattttcttctccaggttctgccatgtttgaaagtatacagaggggtgaatgtggagggacccttcttgaattaccatccatttatcgccagccccaaatgttaggtacaactatgacctattgagcacatagtatattcaaaatgttatttcacttagtttttgaaatagtctcttaaaagagttcttttctccatggattgaactgtgatttaagaggctaaacaagtatctcatggttacgtattaagaaatggcaagttggggccgggcgcggtggctcatgcctgtgatcccagcactttgggaggccgaggcgggcagatcgcaaggtcaggagatcgagaccatcctggctaacacggtgaaaccccgtctctatcaaaaatacaaaaaattagccgggcgtggtggcggtgcctgtggtcccagctactcgggaggctgaggcaggagaatggcgtgaacccgggaggcggagcttgcagtgagccgagatcgcgccactgcactccagcctgggcgaaagagcgagactccatctcaaaaaaaaaaaaaaaaaaaaaaaaaaaaagcaagtggggatttaaaccaaaattggtctttgctctttccaccattgtaggccttctattcttggatataaatgaagccaggggaaaaagaaaaccctataaaaccctctttttcttccctaccccttctttctgaaagcagacaccttaatttggaaaagtcagttcaagactcaattaataaattccctactaagagggacggctgtatgcctttaagtagattggcatggaggaatgaaggcatgaaggaggtaccagcctccatcagcctgacgtcaccagtgttttcaaagaaaaggactagcaaattaagctaacaattggttaatttttcattacccaaattaaattacccatttacctacatgcgtttataggctgtatcttaaagacttgtctgaggagaaagagaagtttgctttagtggctggcaagaggacagatcttttcagaggcaccactggagccaaagtgataaaccattttgtacaggaagactagtgctaacacccaatgtatagggtagatagttgaccaacagtctatatcactggcattgtgattgagacacatttttaatattatccagacaattcagggatatgtgtttcttatgattagtgaagagggaagaagtttcctccttgatgaaggacgagactgaaatatagcctgagattcagttaagtggaagaacatgtgaattttaaaaacaaatggctttccaaccatcatgacttagaaaagagggagaagaaaagaggcatgggaggcagatacacacactgttcaaaggcagagagatgagccaaattgggaccaagtaactctacttaaccttgggagccttcttaactaaatgtagtattatccttccagggactacctcctcaccctggggtaagtatagctgcattctgtggctgttagatgaaagaggaaaagacagagaagcatcttacagaattaattttggtgccctaaatattggcatgtaaatatataacccctggaagaaaaaaacaaaacaaaacaaagcagaacattaaggctttttaaagataggtaaatcattttcttttcaaatgaaattcagtttgactgcatgaaatatgaacagtaattaaatgcacagtctgtgggccttccatactttaaagcgctttctttaaaaaaaaaagagtactcacctcagacaggccaattacccaagaatgatgaagtcaagaggaaagtcgctaaatttctttacttgagtgatcacaaccccagcccgtgattagtccccacggcaccagcggggatgtggcggggacactcacattggaagacttcaaatagtcatttccttggttaaaataaaatctgactgcactaaatagacagtttttaatctcaattggacatctgaagatttctcaagctgttgttggcttcagcagaaacaaatttttctgctttgttgattaaaccagtggtctccaccattgcttatcggcctgcaacgagctgttctttttaattaaaagtgagccaccacgagagagcaattaacagctagtaattactgtgctcttcagaacggcaacattttgcctttcattccaattatataatggacaagtgggtttttgatcttcaaattagtgagctcttgtcctccttgtttggaggcagaattggcaggttaatgatggcctgtgggggcactctttcctctgactgatgtgaggcaagaacgccttaaaggaggcagtgagagcctttcaagacccgcagttccacctttatgataaagacagagaaagagtctttattttcagagggttttgatgaggaggaaagataggcttacatgtggcctccaaacagtgccatgtgcttttccttcttcttatcctccagcaaaaggtgaccaagttttaaaacatggaaaactgaaagtttcagatgtgcaagatggctaagttctggagatccagtggacagactgatgactatagttagcaatattgtattgcatacttgaaattttcttaagaatgtagatcttaaatgttctcaccatgtgtgtgcacgtatgcatacacacaaacacacactcacacaagattactatgttaggtgattatatatgtcaactagcttgattgtggtaatcatttcacaatatatatgtatatcaagttatgtacctcaaatatatacagtttctatttgcaaatgtacaccaataaagctgaaataaacccaaggaaaactggaattagattatgtgatgttttggtatgcctttggtaagggcataaaataccacatgttggcaaaaaaaaaaaaattcctgctctaagattaagaaaggattttgactttatttaaatttattgtaactactttgagaattacagggtatgatatactttggataaaatggaatcttatcttaattgatagtagtatatgaggagtaggccttgcacttattaccagatctagtataaatactgagattataaatagaggaagttggacatttttgttttagacatgtttgttttctgtctccaatctctgctattcatgcaacaacatagatggagctctgctatattagagaacagtcatgtgtcagttgctctccatgcccctaccttttggtggtgacggatggtagcctcctttttgggccagtaattagctgcaggtacaaaaatgcagatgcaatcagccagctatgcctatgctaagcgtaagcatatattttatttatatgcttatgttgagaatgtgatagctacagcaattattttggccacgaatcactttgcgggggatttctttaaacaatataaatttgtaacatgaaccccctggtttctggataggcaaaaatcacatcccaccctgaagaggcagaatgacaagcttctgtcttgtcattcacttgtcattgctatcctttgatagcatcccacaagtctcatttaggcagccaggctggttggtggaagatacaattttgttgggtatggaaacaaatgatacagtatgaaaggaatttgagtttttgagtgtggaatctggtttatgagctcttttcaataatgttacatgaaaataaagtggaatagaattatagttagttgcacataataaccattacgtaaactttcaagatattaaaaagactttttaaaatgagacttaaagcaattaaataattgagtaggaaaaatgagtacctcatatatgactgaattctatcagagaacatcttcattgagcactttactggtataagtcttggttgctggattttagcatccccatcgagacagagctccagctgaagtgatgtagcctaataagtttgaaccacctcccacattcccacccccaccaaatggcaagtctgggcagcttctccattaggttgtgcagccatttaatttaaacacacacacacacacacacacacacacacacacacacacacttctctttttcttttttttttgagagcagaagtcaccttttccctgagacatcttgaacaaagtgtgccttttgatctattttcagagatagttttcagttcaagtctattagtaacttgtgggattcagtttttggatggccagacacccaaaagtagagtagagattcaacatatagctttaaacagagttttacatattgaaacaattgatactattacaagaacgatattcactagcatgcctcatttagcaccatggtctatgttacagtgctactagatgatgctttgaaatcacaacttattttgccaatacaaataccatatactttgcccatgaactaaagttctggagccagatggaaaaaatatgctttgatatgtctccttcttcttaactgctgaaggttttaaagaaataactacatagctttttttgctttcactattgggttgtacagtgtttgtaaagggtgggctattgagtttgagatgtacatccattaagaagcaaattttgattgatataagttaaatttcttgaagtgtaatgtagcaggtggaggacacagaagtctaagggataaaatgaaggccgctttttctttgtaaacctaaaagaaagatttctaaactttttcaaaatgcaaggcttttctggttcaaattattgcattaagtgggggtaaatgtcttttcaatcactgtaatattcagaatctttatttaacatatatgtcctgtgattttccaaattctagagataaatttagtttttctattgattatgatttatgcagttctagttgtcatagagtccaatggtttcaccaacgttttctttgtctaagcctctgggaattggagggataaagctctatactgacatctctctttagtgtttctgagattatatatggtatgcacagaaaaaaataagggctttagataatagttttaatcgttttttggttatgtgaacttgatcaaattacttaacatctgtaagtcccagttcactctctctaaaatgggatattgacactgactctgcaaagctgttgtgagaatttactatcgtatgatacatgccaatgaattgcctggtgtgtggtaagtacttaaataatggttgccattattgttgttagtgttctcaattcatttaatttacagtggctttttgctttcttttatatggcatctgaattcaggaaagaagtatttgggaaagttagtcaacagtaggcattgataacctaatatatgaagcatatggtttaatatgtttatatctttataacaatctgaaaatattgctgatggaaatgagtggcatttttctaaaagttctatgacatacttataactatccaaaattaaattattcttcatttcttcctgaggacaaattactcctataatgatgttgaactttaaagccatttttaccattggaaaaccaagctctatatttaaaaagtgttgtatgatcatctttatctgtggcagagtgtaaagaacactgaattagaagtcatgagattaccactttcttgttcattgagcaactctgggtaattacttaacatttatgcatttgatgtgtaaaagggtgtttttaggggtctctggttgcagtcaacagacactggctctggctaacttaggcaaaagaaaatttattagaataggtttgggagcacacagaattaaaggaaagcaggaaaatcagacttggaaatgggacagtagtcaaggcatctccaaggagttggagatcaggataggtcttgtagcaggaagaatctgatatggattctgccactgaaatgaaaacctctaaatattttttgtatctttatttctctgtgcaagcatcaagttcacagaaaggactccaatgagtggtctaatttggcaaggctgccagcttgtaagagagatgggtttttgaatccagtttcttgtctatgttctgtgagtaacaggtgaatattcaaaaggaaatcagagcactgtaggaaaaggaagtagatcctggcctgcgagaaaacaataactacaatgaggatcataaataatgttgcttttcccacaatttgtgaatattacattatgtgacatatgtggtgatgctaaataaagtctaatgcactgtgtagcattattgttatcagttatttcttgtggatttcagccagtataattatttgatacagaccttgaaccagtaagtggctgacccagcaatcatgttgtgtagctacttctgcacagtgttttatccttaaacataattataaattaaaaaaataaaagcttgagtatagctttggaagccaacatttctaattaaaatcttgaattcattctctacttgaggatgagaaaaactctagctaacatgaatgagagccaaaagtgaatgaattctttattagattttaagcaaaggaagttggtaaatgactagcctggtcattaaaaatcttgtcaacggcataggaaagaatgttttatgttgttaattgcagacttgcttgttgagctagatgcaataataagaatttgtagaaatggcatgtaaacattttttattagcaatattcaaatgagtctttcagagctgggttaaaaacgtggcctccaataagaggtttttctggttttcttgtttgtttttaattgataaagataaaaatattaagtagaagtagaacatcattatatcttgaatgtaaaatgcctttcagtaattttattagaaaatgcttttcactttaaaaaaaaattctgatgtctgttttctagtctttagctctagggatgtaatttctacatatgagatataggaaatgggatgtctgttagtgttcattacattatacagagtcatgcagaatggaatctgtatgttaatgtacttaactcaacccaggcatgtatattcaaattctaagcaaaccttatagttaccctgttatagttggaaatctgagaataatatttctaaataagtgtttttattaaatctggaggggcctgattgtataggtaccttaatgcaggcgttaacagagagataagtaagttgtattcctgaattctacggacaaatgcattgagtttataaaaatctagacaatgatcaaattgaacttaatttctatttagattaagaataaattgatttttcttaaaacttttctttattaaaacttttcctctctcctttgagactttattgttttaacaactgtgtcaatgtatcagtggaagagattaagtttatataatcagatttagccctgtttttaaaataagcaacatgttacataatctaatattatacatgtaggtgaataattaaacctaaaatatccaatcaattaaaactacttttgtattagaagaattacttaggattttgaaatgcttctttaaatttatataattgcttagtaattaaatccttataagatgggttcatgtggaaaatgttaaaattttaaaacatttgtttttgcctgataaagcaatagaaaatgatatgtgtttttttgtataaactattaaaaagtttgtttagaaaagaaaatgtcaactataatcatgtcactcagaaacaagtaccattattattttgcagtattcaaaattctaatgttaaatttggtttttctccatatatcaatttttaaaatatggttttgtctctttttgacatacacaggtttcatctatgtatttattcatagctgaataatcaattaatgattgaaacttttaaaaagatggttataaaaaagccatcagacttatggaagatacaggagtatgtacctatttgattgcctaatccactgctctcatggaaggcctgtccaaatgccatcagtgacttttattgtgtggggcttcatccagttttatttaactttcagatatatcatctaacagtatccattgatagacttttatgatctaataaataggctttttctaatatttttattcagttattttaaaccttcttcctttatcctactgttaaattattaaacattatttaaaaactataaaatgtaactgattgaatatagtgctgtctgggaaatttcacactgttgccataagtgactataaagcaagatctgtagttttaacaggatgtttttatctcttctggagatagatagtgagggctagagagccttagaaaatgttaccaagctgtgtatttttattcttgcttttcctctattggttacccttaatatacattataatttttaattttcctaaaaatgtctgcagttagtagtcttaacctcctccctaggaagacaaggactttaatacattttaacatcccttcaatctcttgcatgatcttgccatcaactcctatttttgacattattatgttctagcttcttttaaagcatataatgctttagatatatcagcatgttttgttgacttatttggtccctgtttttccttgcatcccattctttttttttccccctggtcgaagtaaattgtttagtatttctttccaagatagctcctgagaagttagcttttttaggtcttataagtctggaaatatcttcttcttgtctgctcttttgaatgatggtttgacaactggatacagaattctggtttagctattttgccttggaactttgaaaatacttgtccattgttttttagcagctctggttattgaggagaacagttcttctcttattctgactatactcttttttttttttttttttttttttttgtgggtaatctgtcttttctctctgcaagcttaagatttttctctgtatcctggaccttttgaagtcttactgcaacatctctaagtttggacttttcttttttggtacttcttgtgactgtttctagtgctcatgtcttttattaattctggaaaacttagccatgatctgttcaaatattgtatctcttctgtcctttccttctggtatatatatgtatacatataaacatatggatatttatatactcatatgtatatagttttatatctcttaactctgatttatttaaatatctttatctctttacattctgtgagatttattgtttcttcgtaaaattaactaattttcccttcagctgtgtgcagtttattctttagaccatgtgttgaattttttacttcacgcttttccatctaaaaatttccaattggtttttttcataagtattgttttttctatagccctacttttgtttcactgatgctaatgctccttttcctcttagagaattgtaaacatcattatttaaagtccatttcagattgcttagttatttctatttctttgtataggtttcccttctattgggcttatcaattacctttacagtgctgattttcttgtgtaaatttattttttaagagcctatcttgcatgggaattttcttgaattcattcttccctgtatggtaattcagcagttgcctcaactccaccaggtcttgtgatagtgtggatagaacagccttctgttcagaggctggcagtgaagttttaactctggctttatgcagtgtacttgggtcatgtgtggggcaggctcaggcccttttctgtataaacactgaaacccaaaacctactgttcatctttgggcataaaccgagcatcctttagtattgtaggtttccttttcttttatggtccatgaaaactttcttgcttttggacagagtttcactttcatatattttaaaaatcattatccattatttctcgcttttgaacagggggcaattttggcatgtacttacactgccattttggtctgttattttcgtgggatttaaaaataagttttattttcaataaatatttttcacacaggtaaacatgtttttactaaatcttctttattaatttaagatataatatttcaaattacacttaactgatatggaagaaataattgtgaacattggtacaaattatgtattttgtcatcttgtacttcaaagctccttggattaaacattaatgaagaagaatcaatagagagaacagaaataaagcgcatattcagttgaagtctgaaggagtttttaagactctagagaagagaaggtgtaaaatactaacttttgttttttcagctgatttatcaatgtgattcacacatttctgaggccacaaacaggatatatggcatatgttggcctaagaaacaaaacaaaacaaaactcttcttttgtactttattcgataaatagctaaagcctacatatggaatttttgtactgattcactcaacaaacacattgactttatatgagttgaactttatttagacataatgagaagccattggaatgtctgaaatgtgaggagacataatcagaattatgctttaggatgtttgttttggcaaaggtatgcaggatgaattacaagagagaaaaactggccgggagctgtgtctcatgcctgtaatcccagcattttgggatgccgaggcgggtggatcacctgaggtcaggagtttgagaccagcctggccaacatggtaaaactccatctctactaaaaataccagtaaaagaaaaaaaattagccgggcctggtggcaggcacctgtaattccagctacttgggaggctgaggcgggagaatcacttgaacccaggaggcagaggttgcagtgagctgagatcacactactgcactccagcctgggcaacagagtaagactccatctcaaaagaaaaaaaaaagaaaaagaaaaagagaaaaattgaagaattagagagctagttagtgggctattgcaaaagaagcattgggagtaaatgataaggacctgaagtaggttgtggcaatagggatagaaagaacaatataataaggtaagaataagcaggacttggttgctgatagtaagtgggaagcaaggagtcaagagaagtcaaatatgaactgtggcatggggagaataatattgccattaaagaaattactaaatcagactgctaggattaaggaactaaagagtctgctcattttaatgtgttatgaatttataaactctttttcagaaggaatggtagcaataaagagggaagaaatagggtaatagtttgaatggatagaaggctaaaatctttcttaaagtttatgcatgcttggctgtgtttactgaatataatctattttatgggggtcccaaagaaaatttttctgtagccatcacagctacctgtaaacatttattgttcattaccatatgtttagaaaatagaatcaagaaagagccattattttctttttgattttcacatgatttggattttccactgaagttcaagcaaaagtcaacttgggatcttgggaatgaactaagacgtggaaatgcttaggtccaaccatgctctgaggaaggctttatgatggagatggaatcagatactgaacgaaagaatttgaagtcattgcagggttatctccagccagaggggaaatggccagtcaggaagaacaactggcacaaggagccagagcagtggcttgccgataacccttgggaagagcaaccctctctttaaggaagtcacagaattagcttcctgaaaaaacacattagtttgacgattcacttgatctcaaatgaggtatggatcatggtgattcttaaaaaaaatgaggcagttttagaaaacttgaggaaatccctcttttaggttacaaacaccacaagggttttaaaacaaaagctcttagctaagggataataatttccatatgcacgtttggttctaacatgagaatatgtttccaaagacgggtgtattgtctgtcttcaagggaatctttaaggcttatagaggcaactggctagccactgaattccagtgaactcctgatagactctgcccatccctaatatgttttcaatggtgagaaattctgccactggccactgcagaattttctttgcttccaatttccccataacaacagggctttttcttgtttgaggaggctcccatatcctaaatgcagatccaagagaaaagctttgcatgtcctcatttgttctccatatttgtgacttctagttggagtcgacccttttactggtagggtcgttatgcttactatgtgtcaggcactgttttgaagactttacaggtatagctcatgagatcctcacatcagtcttatgacacagctctattattatctattctaaaagaagaggaaaggacaaccccaacctgctgaaagttttcagctagtaagcggccagccatcaattaacatcactgtgccatgctgccttctgtaagtacaatgtgactaatggctttgaaactgaagagcttttgtgagtgactggttcatagttttgatagtgaggccagtgtccaaattaccagtatattcaggtttgggccatttagcctcatttggaaaagccatggaaagaatgagtattggaatatgaaaatatgctagtctctccatttcttagaggtgttatgaatagtacttctttgtaattaaaagttgtttcaactaagaaacaagcattctttcgaaaaatatagtctcttctattatgcaaaagaaccaggccagacacaggttcacactaaaaagacaggtgtgtaaaatacagactctaattgtagctcagaatattataatatggtgtgtttagaaataattatcaaagaataaaaacttaaattaatatcatatttgtggtgaaactttctgtacaattgaaccatctgctgctccatccctgtcctcccccacatacaattatagtctgttgtgatgagattctacctttttcactacccaggcttatcaaagctataaaccggtcacataattcacagaaggttaaagatacgtggagaacttggatagggtccaggggagagcaatgaaaatgattaacgggttggaaaatagcactgatgaaaaaagatgaatggaatcaggattaccggtattgagaaggtttagaggtgacttaataactgtcctcaactgtatgaaggactattaagagaagcatggtgaccaaatgtcttccaagaaggagaaaaggatctagcctacaacagggaagatttaagctagatgtgaatttcaaacacgattctcctctccatcctcactagtgtcatttattgactctcttccattccttggatcatcattattgatttttaatgataaggatgaaggtgaatggcaccatggctgaaacagtttaatagataactaaaagatttcttctcatgaaggcagtgactctcagttggaagtttggagtagaaagatgaatcagaatcaccacactgggagcttttacaaaatacagatgctccagggtccctcactgtcctctaccttcccttgaagaataagtgctttaaaagattgtgctctcgattagttaatacagataggtgaaagcaggaagatcttagtggtgtataataaaactttggtgatgagtgtattcaatggggtgttttgattagttggccattttagttagcttatagctaatgtatttcaatgcttacaccttgagaatagtttgatctttttaacttttccttgctttaattgtattctcaacagttagaacttgtggcatctgacttcttgggtagcagttttgcaaagcatagcaacatgaatcaagagtaaggcaaagagcgggcttggtatttgggctgccttacgcccttgggagccagagaggaagaactgggcagtgtgaactgtcaacttgttagttttaccaataagtttactctctgaaaatattccctctcaaaaatttatcagtaaaaatcacaagagcaacatcacttaaaattaggtgtttcctttgggtaataaaaactgagattgtcccctgttttaaaatattaaggtggaggaaataaaacacaaggcaagcagagaagacggtgaaatggtcagtgtaatgtttacatgttatgagaaggctgtataatcataacaattattttccctcaaaagctctacctctttgatctagctcaaatttcacaccaaccatcaaagatgattgctgcataaatctgtattctttcctaccgtttaaggttattggtactttgattaatttaaccacgttactgtcaggttgaacacactcatcttctgtttcaaagtgtgtactcgtcaatctctctatggttccttcccttcaggccttatttcatcacatttaaggagactctcctgccctttatcttgttaggctttcaacagcttaagttgaatcttcattctttcattcttgctgtcaagctttcttcaataggctctctcatttccctattcataaagtgtcagggctgtttctgtttcacacagcattatatgcagagtcagacgttgctacagattaaatcatttcccatctgaggaacttcagttacccagtatataaatatacacccagtgtatgtgtgaaatatatatatatatgtatacatatgtgtatatataaaaatacatatgtctgtatgtcttacatacatacatatatatgtatgtaagacagtgttcaaagcagagtgtggtgttcctcgttagattctaagggaactgcaaagtgaaggaggcagcaatgtggttttgttactggtgggagctcgtggtgctatctgagaagggagaagaaccatacaggttttgcaagagattaaagcttcattattccttttgaagatgaggaatataaaatgacagtgttgcacaggtatttagaatcaagttttatgagacatgctacttgatcaaataaaccatatttgcaaataaaccatattaacggtgagttctgttcttgagccccagtgcttggtacccagcaaatgttcaagtatctttttgaacgaataaatggagttgtatggtatggctggaggctcaagaaaaatgatagaatacagtgactaaaagacatattagctaaagtttcagcgcttgaacaagaagattgttcattgttctgactatagctttctattctatttaaataagaaaagacaggtaggtacgattatgtttctaaacatgagttattatcattactattttttaaaatggagtctctctctgtcttcgaggctggagtgccgtggtgtgatctcggctcattgcaacctccgcctcctgaattcaagcaattctcctgcctcagcctcctgagtagctgggacaacaggtgctcaccaccacgcctggctaatttttgtatttttagtagagggggtttagccatgttggccaggctggtcttgaactcctgacctcaagtgatctgcccgcctcggcctcccaaagtgctgggattagaggcgtgagacaccatgccgggcctaatatgagttaattttactggttactccatttattactatttctttaataacagtattataggtagggttatataataatagtattaaacacgtgtatggtaaataactgtatttaacttgatctttaatattattttgtgactgcgcttaacacaagtagttattttttatttcctacttaggttgaaaatattatacattgaaggcagggattgttatatatgattcaggataaaaattccagaataatcttcagtggatgacaagtcctgaggttggccaaacctataataatggctttggaattgagcaaaggaatgaatggaaaagtgatccatttattcaacaagttttgctctcatacaatggacttgactgctgtttcattgagttggtcaactaggtcgtattttgcttttcattgaaagctaattctttcttaccccacgaactttctctcctacttgctataatatctaaatagcctcatatctattttcaacactgtgcatcttctcttcctttaaaactcttcttcaaagtcagtagggtcatgccactgaccccatgaaactgaatgtgtgtttgtgctgagcagaattgaagacaatactaatgtaccaaacttgggaagcttaaaaagcacttatctttaagaattctagtcccagataaaagtgttttctttgatatttaaatatggtctgtgcctgttttattgagttaaacaaacaaggcaaaatatagcaaaaatagatgaaattatatcacttcttgaaccaggaaaagaaacaacttttataattggcaatagatgaatgtgatgtgattcatagcattttgtacatttagtcttggagatcccatgtttctgattgaaacacgaaactagaaggattgatgaagaaagtgaaaatttatcatgtagtttctaaaatccacttgaggttggtacaaatgtcttacagagctagttttgttggtacgtggctctggttggtaacaatgctgactgtgtttctgaaacaagaggtcccaaacattgggatatggtttcctcttagtctattaggaagttttcattgttctgagacaaaatgagaaaaatgtagttattcatgaagataaattgaagtcttcatttcaaagatgtttgattattgtgagattattattcttatttttctgttttatagtgccttttcttttgtgaaataatgttagtgtctgtatgtatataaaatttatttattttaattactgatacttaaaagtcttggtctgcaaatcaccaacctagagccttttctagtatcatctgtagtccatactcatgagacctggaggaaactccaggccttttggttaggacatttgccctgggtggatctactttggtcagcaatcgtctctggagtgactttagacctgattccaggatttctaagtggcaatatctattctcctttttcatgttatatactcaataattcatttgatttttaattatgaaatgtttcagactgggcatattgactcatacctgaaatcccagcactttgggaagctaaagtggaggattgcttgagcccaggggtttaagactggtttgggcaacgtaaggagacccgtctccacaaaaaattaaaatgttaactggggatagtggtatgtgcctatagtcttggttactctggaggttaaggagagaggattgcttgagcccaagaattacagaccatcctgggcaacataaggagaccctgtcactacaaaaaaacattttttttatattatgaaatgcttcaaatacatgaaaaagaacataaaaatacctatatactcaaatattaacattttgcatatctactaacaaactctcttttgcaaaagaaagaaaatattacagataaaggcccacccctcctttctgttactcttctcctatatcctaaagttggtgtaaagtatttcgatgttcatttttgaactttaactgtatatgttccatcacaagctacagattctcttttggcatgttttaaaatgtacataagtggtactatactgtacatatcattcttcaacttgcttttttttactcaacatcttgtatttgagattaatccatgatgataaagattcaacagatttattcactttaactgtcatatgatattctattctatgaatacaccacagtttattaatttgttcctctacttagaaaaatagttgagttgtttctgcttttctgttatcacaaacagggctgtatctagcatctcgtttgggtttgtttgtgcacctgtgtgagaatttttcaagatcgataccttgaattgaaattgctgggttgtggctatgtgcatttttaactttgccacctaataacagctcgtgttgattgtacactttacactcctaataagagtgattcaatttctatttttgctagatctctcttcatcctgtcctctcatacaatgattagtattatcagatttattaatttttgaaactctaaagcgcatgcaaagtctcatttgactttctctctttactaataaagttgatcatattttcatgtttattggccattcaggtttcatttctgtggattttgtatcatattctttacaggctttcttttttcagttttacatgacactaatgctttgttgcttacatacattgcaaggtcatctctcagtctgtggcttgtctttcactttgttaatggcgaactttgcttaacaggaatttctatttttgaagtagtcaaatctatgaatatcccgttttatactttatatgtttgtgcttttatgcatagtggcatcttgttttagaaattgtttttgactgatattataaagctattttctcttttaaaaatttctattttgctttacatatttaggtatttatttgaaatttaatttttgtttgcatacgaggtaaggatctagttttatccttttttctacgcctaaccaagtgttctggctctatttattgaagaattattcttttccccactgatttattaataatgccttctccatcatataccaagttcccacaaatgtgcaggtttgttccttgggtccctgtcctgatcatttggtccatttctttatcctgatgccacaaacacttttttaaaattgtcacatctttttaaggatatcttgatatctgtaagccaaatctctttctcttcctcaagattgtttcagtcatttattcttccatataaaatttacagtcagcttgtcaagtttcacacacatacaaaacctgttctatttttatttagattgatttgacttgtcactttctctatatgttctctagaacaatttctttaggatgggattactggttacttgaaaatctgttaaaaccccttctttaatactaggttaatgtattttggagatcagctacatattcaactttttaaatggttacattcagatttgctctttatttatgcgtcaatttcagtaagttttatttttctaggaagttattcttttgtctgggttttcaaatttattgacttaaaagttgttcatagtagtctatctagcatttaaaaatctcttgtgtatctgtattccccctttaaattactaatgttttcatttatgcttccttttaaaaaattaattcagatgccaaaatttcatctgttttattagtttaaaaggtattttacttttcttttaaaaacttttgttttttttaattctgttcatccttttctaaatttttgaattggactcattcattggtttttactccatttcattcctagtataaacatttaagtctatacattttctctaatattggtttagctgcttttcacaagttttgatatataatgttgtcaatattatttagtttaaattattttataatttctgtcatgatttctcttttggcccatatattatttaatattctttaaaatttctaaacatgagttgtgttatagttttgttattcatttttattgtactgtgctttctttgtggttaaatatggcaaatttttataaatgcttcacataaactggaaaaatagtgtttttattacttttattacttttttattttctgagatagagtctagctctgtcgcccaggctgcagtgcagtggtgcaatctcggttcacagcaacctttgcttctcaggttcaagtgattctcctgcctcagcctcctgagtaactgggattacaggtgtgtgccaccacacctggctaattttttttttttttttttttttttgtatttttagtagagacagggttttaccatgttggccaggatggtcttgaactcctggtctcaagtgatccacccatcttggcctcccaaagtgctacgattataggtgtgaactaccgtgcctggcctggaaaaatagtttttgtatacagacttctatatatgtttgatcaaacttgttaattatgctgttcaaattttatgtgtttctactaactttgggtctttattaattacagagagaggcgtgttgaaatttgccattataattgtgaatttgtccatttatttcttgtaatgctgtcaatttttgcttcatgcttttggaagttaaactataaattccagtaagcctattggaataaataaattccaatttatttatgcctataaattccaaacactgtatctccctggtaaagttttccttttgtcattttgtaataattagggaataatgattttttcattgaagtatactttgtttcatattaatgtaaccactctagctttctattttttggtatgtatttttttcatccacttacttccaaactgagtccccccaccccgaccctcccgccccctcccttttttgcatatatctcttccaaataacacatagctggattttgtttcttaaataaatttgtccttctttctcttctaggctatgtatatctattgtgattagagatctgtttggatttatttctttcttcttattttctgttttgtatttgccctgctttctgtttctttttcttctacttgtttttctttctcctttcctgcttcctgtaagattcaccaaattttatttattttttatttttccctctcctacattctatttgtgttttcttaaataagcacaaatagatatttaatgtgcataattaacaagcctcacattaagtaatatctaccctctttctgaaatatggaaacactgtagatcacattaattcagattgtccccctcccctgcccccagtttacatgctaattgctgccaagtgttttcgtttcaccttgtacttacaacttccaaaggagtcatgttattaatgcaattaatgattatttagatttatacacattatttaccaatttattttctcaccattgtttcttgtatcctactccttccttccgggttcaatattattcttcttgaagtatattctttagattaattttagtaatgttttgtgagtagtaacttctcttcacctttgtctgtctgaaaatatctttattttactcttttttttcaattagtttttggactatacaattaaaaatgtgaaataaaaattaaaaccaaaagaaagacatgagatatcatttctctaatgacaaattaaaaaaaatctaaatagaacttgatgatttaaaaattaattaattattaaggaaacattttgtggtctctagaagattattctacaggtcaaccaggttatgtctaaacctgaagttccttttgtctgcttgctttctctcctaaaagagtatttgcttgaatgttttgtaatttggggctgtgtgctcattttcacaaggctttatctgagaaaatcttgtagagcctacatttagaatacgttgctttggagtagtttcacatttgtttctgggggtttcagactgagtttatatttgatgagcatattcctcattctctattccaatcctaaatcccaggagatagccttttttctttttttaactcagattgattaattatccaggtgttcttccccttctgggtaatcaaaatatattttcaatagatctttgtgcatcaagtatcattttcttcttcattccctcagtaccgataccaaaattatctttctcaaaggagattctgatcatattaattcttcatggtttaccatgaagatacagaacaagctccaaatacttggaaagatctgagccttgctgtttggtttctggcctcaaaattcttctctcataaacacttgatgcttaagttgaaaattttttaacattcctggaatgtataatgagcactcttgtttcaatgccattacatgtgctgcttcattattagctatcctcctttacttagtaaacttctactattattaaagactcaacttaggcattgtggagaagtgctttcatgcttgggttgaatataattttgttttgttattgtttgttgatttgcttttaaagaataattaaaaacacaaaaagagagtttatcattttatattagtgggctcttcatatttccacacctaaaaccacatcaaacttggtgatgtctctgggatagtgtatatatatatacatatatatatatactatatatacatatatatatagtatatatatacatatatatactatatatatatgtatatatagtatatatgtacatatatacatacatatatactatatatactatatatacatacatatatactatatatactatatatacatatatatacatatatactatacatatggtatatacacacacacacatatatatacatatatatatttagaggaagaattgtacatttcaaagttatctctattggtggatttattagctaaatgcaaaatcgcatatttcgttgccaaattgcctttttgaaggtgaaaagtaaagggagtgtatctgagcacgcagcctttttagtaaaataaaaagatctgcatactcatttgcctttgctactaagtagctgagtgtcttctctcttgctttgatttccctctttttaaagtgaaaatgttggatgagatgatcttcaagtttcctctcacctccaaacttctagtaatttgataaagtgtcttagctttctagagatattttattgtaaccctctctttttagttggtaaatttaagttaatgaatgtctcacaattcttagaaaataaattatctctaaggtaaatttgcatttaaactattttgttgactacaaagtgattggttaatataacactaacgagaatattctggctaaaataaaattttgtttttaaccttattttgatttaaaagagcaagagcggctgggtgcagtggttcatccctgtaatcctagcactttgggaggccgaggcggttagatcacctgaggtcaggagtttgagactatcctggccaacatagcgaaaccccgtctctactctaaatacaaaacttagccagacgtggtggtgcatgcctgtaatcccagctactcaggagactgaggcaggagaatttcttgaacccagggggtggaggttgcagtgagccgatatcataccacttcactccagcttgggtgaaagagtgaaactccatctcaataaataaataaataaataaataagcaagagtaaagatcagaaatgcagtacttcgggaaaggtgcacttgaagccccgttaataggcaaagctctccctaagtaatatcaactagctaatgtaatcagtctcggtgcttgctttactactgatatatctgagctggtatgctatagagatcaataactcttttgatatgcttgtcaatttgtagtgttgatgagcaatttctcttaaggagtctgccttccaatgttagtgtgccttcataggaaataaaagtgccataatttcatgtgaaacatccatctgttgttaatatttaattattatttccattattagctgagatgtctcaatccctgaaaactttaatcaactgctcctaaatttactgtgtaaaataaattttctttaaaatttctttgaggtgtttatataagttaatagctaattgcattttaaatcttgaatggaaaactagaatatttatgatgtttaagtcattagaattgggcagagcatctttttaaatggaaaagaatattggaaagaaataaatatcttttgctgaaatttatggaagtacacactaatcagctgtgatatttaaatttttttctccctaagtttgttaccttttaccttccatattttttatgtctctcaattcttctaaccaatattttctttagccctcttctttatctcctctttctttcttttttctcttttgtttctttttaaaatttctccttcctttgttcttcatcctttctttctgttataaacattcacatatttacaaagctcatcaataagtgcaagcagtaatgggattgggcaaagcaaaatgttgaattgtgagataaaaagaatcactttttgtttactagagaaattgaaatataacagaataacaatagattattttaaatgcctggtagctataggttgtactttccattagttatataaaacaatggttttgggggcaaaaaaaagaagcaagttctgaagttcactcttgattgcacccaccctgtagaatcatggatgctgccaattttgagcagtttttgcaagaaaggatcaaagtgaacggaaaagctgggaaccttggtggaggggtggtgaccatcgaaaggagcaagagcaagatcaccgtgacatccgaggtgcctttctccaaaaggtatttgaaatatctcaccaaaaaatatttgaagaagaataatctacgtgactggttgcgcgtagttgctaacagcaaagagagttacgaattacgttacttccagattaaccaggacgaagaagaggaggaagacgaggattaaatttcatttatctggaaaattttgtatgagttcttgaataaaacttgggaaccaaaatggtggtttatccttgtatctctgcagtgtggattgaacagaaaattggaaatcatagtcaaagggcttcccttggttcgccactcatttatttgtaacttgacttctttttttttctgcttaaaaatttcaattctcgtggtaataccagagtagaaggagagggtgactttaccgaactgacagccattggggaggcagatgcgggtgtggaggtgtgggctgaaggtagtgactgtttgattttaaaaagtgtgactgtcagttgtatctgttgcttttctcaatgattcagggatacaagtgggcttctctcattcattaaaagaaaatgcgacatctttctaagattctctgtgggaaaatgactgtcaataaaatgcgggtttctgggcaaaaaaaaaaaaaaaataaaaataaaaataaaacaatggtttttcactccatgtatttatttaaacataaattggtctgcaggactgtgttctatatgttaagttgtagttttggctgctagtcgagtataccatgaattaataatcacctgatactgattcgagttgaggtgaataccaagatttattgacccaagtggaaaatatggaccaaagtgaaacctctgtcaatatttatttacctttacaggaacaattaatcttgatactccttgaaacaagaagtcaatatatgtattgttatgtacttttggagacttccattagaaatattggcaagtccctgcttcgtggccatagatttaaaaggcctatcaattttaaatgtttcggtcattgagagctaaaacatgtaacatatcacagtgttattcaccagaaataaaaaatcaagagtctgctcagagtaggttaatatgagttcctttcttcagtccagctgatggtttttagtaagatgaactgccaaggagacaatgagcactgacttctcgatgcatgacttcatcttgttagaaggtgggttgccgggcgcggtggctcacgcccgtaatcccagcactttgggaggccgaggcgggcggatcacgaggtcaggagatcgagaccattctggctaacacggtgacaccccgtctctactaaatatacaaaaaattagccgggcgtggtggcgggcgcctgtacaggtcccagctactcgggaggctgaggcaggagaatggcttgaacccggaaggtggagcttacagtgagcccggattgcaccgctgcattccagcctgggccacagagcgagactccgtctcaaaaaaaaaaaaaaaaaaaaagaacgtgggttaagctcccctgtaacagagctctgcagtgctcctccccatggtgaatgacacaggcgagtacacgccccagtgtgtcttagtttcatcatgagaactttgtaagcagcctgtaagggaagtacagactgtgagatttagaccccttttttttagttgctttttttttctctaataagatcgtggtggaggtaaaagaaactgttatttcacagtgactggaaatgtaatgaagtacttgatatctatgcatgaagtgttagagttgaatttttaaggagagagatagcatattccctccagtctataaattcctgattcagaacatgatctcaagagttgtactttacatttctcttcccaccaccaaacaataacaaaaagaagaaacaaatgaaaactatcagtgcccagtgggaattccagttggggcagatctttgagatatggtattaaaatgatgacttgtaattaagaatgaaacctttttgctccatatacatgtagatgaaaagctaacacctcaccatggagcagtcattgcagtaatgttcattctctttttacttaacagaaaccagaggttgttgtgtctagggaaatgtccaacaagctagtgaagtgtgttgaggacacacacacacacacacacacagatttgtcactggaataatatatatttatttgtggaatagacaaattatattctagacactgtgaaaagtttttagttttttttttatttttaagtatttatttatttatttgagatagagtcttgctctgtcacccaggctggagtgcagtggcaccatcttggcttactgcaccccctgcctcccaggttcaagcgattctcctgcctcgggctcccaagtagatgggactatagacatgtaccaaaatgtccagctaatttttgtatttttagtagagactgaatttcaccatgttggccaggctggtcttgaattcctgacctcaattgatccacccgcctcgtcctcccaaagtgctgaggcttttttaaaattgccaatcccaacattgtctcagaattgtttttaatacccagcataacctaacatgccaagatatacagctaaaagtcatgaattggctaatgtccatgaccgattaacacattagtagatttgtgttcagcttaaaaacttcttaacttgtttttttaaccgatgttttctgtcatcctggggtgatgatttgcttttttgggggggcaggtgttatttatttttataaagtttaattctttttctggttaaaacagaaatgtacactctctttttgttgacttgtgaagtacagaaacgtgttttaagattttgtgccatgtattgttaatgaggatagcaaaaacaaaactcaacaaaacaacaacaaataacaaacaagcccccccgccccaagaactcagaaacaccaggaaaaatggcatcttttaatgtgttgatccttgacactctgcagacagtagcagcaaaaaacacacatccacaaatatgccccttaatcttcagagaggagcctcctgaaaagcacaggcttctaggatgtggctcagaaacagcttatctcccttcatctcctttttgaagaacaaaaaccacccacctcattggttaccaggtcgccctatcatcaaccaaccagcttggacaaacacagcagagaacactaaaggatcctatactttgactagtggaaggaaaaatggctggtgatataaaaggccaacttatttacgtaaagaggtattataaatggtacgggcaaagtgactaaagagatgagaaaaaaagtgggaaagagaaggagaggaatggcagccacaggggaaggggttgggggagcagtggactgagagcagatgagaaggaggaagagcagtgtagggccagcgagccacctgtatacaccttgtaaatccttttgttcctacttctgggaagtactccagtagtacttgaagaactcagattgcagtgttgaaggcaagctagcaggtagagcccaatgctttgaggtggagattaggatggaaggtattcatgggacagtatatgtgataaagaagctctttcaattaaataaaaagaagacagcactagcttgcttgaaaaaacacaattatatttgaattcttcacatgtcaatatgttagtctttggcaacctacagaaaaccatcatcatactttttttataccaatagtgatgactccactttgaccaaaaggcgaatcaatgtagaaaaaagtccattgtcttcactgtggaaagtacatcgaatctggagtcagatggattagcattcaggcctcttggtagttttctgatattggacaatttacttactctgtatttgtttcagttaaaaaatggggaatttgtcttaacatttttgtgagtattaaaataagagattttaaaggtgcctggcacagtgcctgggacagagtatgtgctcaattatattagtcacgttcctgccttgtcaagagcttttcaggtccctataaggaaaaggccataaaatttagaagacattaggcatgagttttagtggttatatcaccaaatgtgtctgctttctaaatttgtgcctgagaatcaggcaaatttttttttttttttttttttttttaggtaagagaaaatctgaaaatgagacgtttcattcacctccatatctttactgctcagacacattggctgatatctgcttggctttacttccagtgctttctctaattgcagaggcatgtgaaggccgtaatctttagaagagccttcaaagccttgcatggtctggccctgcctgtctttccagcctcacccttgtgaccgtctcctccactgtctatgctccagccacactgggcttcattctttcctccaccaacccaaactttctcctttcttagggtctttgttacctctgcttgagatactgttcctagacgcctccctttccttcttgttgctgctcatctctgtctcttgcacacacacacacacacacacactcacatccctatctatgtgaattcctacttgctttatatctcaccttaagtgtcacttcctgcctgagaccctagcgtatgttagatttgctggtcaaaagcttttccagcattcctcctgctacttatcacatttatgactaattagttatcttggtagatgttggctaatgtctgtctttctggctacagtattagtaaagacagggattatgtttgtctgaatcactactgtggccctcccattcagttctatgcctggtacataataggtgatcaacaaatattttggtgaataaataatgctagatgcagaaacaaattagtgactacatcattgtagcattacaagattgtggagtcctactgtgttccacatcaataactgctggctctgtatggttaatctgtgctctctgaattgtaaaatgacccagtatggttaaaaatgggcctaaaatgacgtaaatggtttttatcacagaggaacacccccagatatttgttcacaaaggaagctggtttagcctaggaattggcatcccttctcctgtatagtttttttaagccataatactcaagtctatcaaatatcctagcacaatacacacaaccttagggaagtggcaggcaccagtcgctattcccgtgggtggttaagcctttggtatctgggaacaactgaagggtagtaattggtgatacttattgtctgaacataactcaatcttggcttagcttgggaagtattcgtaccctcacttgtgggggtgcttggccaaaggcagaggtgtccctataggtcactctgaggcatttttatctgcacaatagctattaacaagtaatgggaaaagtggagataggctggttactctaggtggctgtaaaacaagtgtagataggacacaaaggagcagcagagtgagtacacatgacaaaaaccataccgcatattgaattctgccttgacaatatcattcttctacagttgtcaatattaatacttttctataaggaaatggaatgacattaatgatacatgcaacatcctttatgtaaaaatgccccaaatccaagagccttccagagcaccaggaaaagtttcagagccattggatgtctctctttgtcagatgccacggtgtcaggctccgagccatttgtcatccctgaatttcattatctgctccttccctgtctttcattctcagtttgctaggacatttgttcaccgttgacctccctgacaaataatacaccttaattatgttggcaagaggggatatgtcattcctgggccactttaattgtctatccgacaggcatcctgctgtggcatgtagcttctgtggtattttgactgcagtggtaggactatcctgtgcttgcgctttgtctagagatagtctcaacttttacaggttctgaagataatatgtcttattgaagccgtgtatcacttttgttttgcagttgctaaaacaagctctcacattaatttggtggaaacagtacagattggctatctacaaggtttgccttggaaagcaaaaaaaaagtctgcataaggatttagaatgaagtaaatactgaaataactacaaaggttaagaagaaaggtgtttgggcatatcaggaagctccacaaaggaaaaacagctgactgcagctccaggagcaggacgcagagcctctagtttaagtcagctaatcctttgcaagaaacagagaagtgctcttggccaaagattaatcttacaattccattctcacataaaaatcctgcagcctataacaatcttgacttcgggactcagaaaaaaattctcttttataccttgcaaggatttggatcattgatggtcttcattttggcacttgtttgtgtttactccaagatttttgtgcaattctttgcccatgggagaatgacggggcgcaaagataaaagctgatgagggtctcagcagcacttcgaagttgtgggagccagttaccatttggagttctcctttgacaggggtagatgccttaatttgaaatgccatttaactaggaatctacctagacctttgcagtgtgaagacttcctattgcaaatgaaattgtgtgtgtgtgtatatatatatatatatatatatatatatatatatatatatatacacacacacacacacacacacacatcttacttatccagacctctaggcacatattatgtcgcatgtaggagtttattaacatgagtatttctaaaaagaaagctattttatccatagcagcaggtaaaattttagtttgttggcacagtccgttgtctcatctctcttttcttctgcctaacctgtctttgccggttttctcatcagtggaacatgttgcctgtgaggttaggggagaaaaagaaaaaaaaaaagaacagcatcaacaaaaaatagcatcttcttccactcaacctgcaaggcttcacaagggtaatctcaaaggtcacctggctcctgttttggccaagaatatgtggattagggtcacaggagggcgagattttaatttcacaaaaatatgtaaagggaagggggagaagggggagaaaaaaaagattacttgcagagagcatgagtaccaagggaggcatgcttaggtgactaacgacacctctatcagaagaacaaactcgatctgcatcaagcattgagacagatgaggccaatttcacacagtaaatttcttggccatgattgatgtgcccctgccgctgaatgtgagcaagctctctccgcacctgtcaagcaccgggcagacagggatctatcaaagcgttattgatgactttacactgtactctgcaaataaaatgtaatgggctaactggaacatagatctgagtgatgttacttatatattaaatatgtcacatctgtagaacaaatggtggttagataagagttatcatcttcagggctcaataaatattttatcaagcataatggaaattgtcaaatcaatctaattgtgtaatacattatgaagacatcaaaattaaacaaagcacatatgctatcatttcattttattagtgggccactgttgtgcccaggaggtcttgtggtggttgaaggctggcagagttaatactatatatatgtttccctttcctctccctctgctgcttatggaactggctagatatttcatcaaagtattaatttctcaaatgcagacaacttcaaggcataattagattagggagaacaaagctgcgaaaagtggcatcaagccacaaattcactttagccatatttagagcaaatatctctgtgcttccatttcattttatttatctttatctgattttatactgttgcaataaaaaaaaacccaacatgagcaagaattatctttgagccagagacatccatgctagctcctaactagcagcaactgatgtttcaaaatacctttgtcgtttttgttattggtggttaaaaaccacttgaggtttccctcctcctccccctttttttttaattggcaagctaggtactttacaaagactatggaaaggattacaaaatctggcaagactggctttggcttggtgaattttaaatatgcatttaaggaatgattgcgtctttcttttctacccgatttaagacagctattagattcggaaaaaaaaaaaacttcgactttttagtcactatttttaatgtgctaaggaaacattaccatttcatccatgtgtccattaaaagaaagggcagcccgtattcctggccttagaaattctcagtttggcttgtcactgtgatcaaattcagtcccagggtgcataagaggaaggtcatgaaacatcctgtgcccagtttttccagaagcaaaatgggaataacttaaaaaaacacttcaaccgtcttgataaagttgggccaggggacaaagtttgctgcttgtcagggttagaactaaaatggttatattaggataatcatgaaagatacttatttcaatattaaatgactttcagaatgaagtgcaaccattggcaacaaataagagcacaaattgtcttttttcccctatagaattatatgctatgttatcattaaaaggaatttcaagtgatttgtatgtgcatttgttaccaataaatacatggactctgttctgattgtttacgtgctgtgttagtaattcagactgttggcctgaggagaatacagtaggagttgttcaggctttaagaatcacaaaaactgaaattggaactcagcttggcccctactagcaatgagatctagggtaatacatgtaactttatcgaacctcagtattctattctgtaatatgggataatagtatctacctacagattttatgaggtaggcagacagatatcaatatagattgattagataccatcataatgggtggttaagtactagacactaagctaatatatatcagttatctcttctcacctgcagaatcattctgggggcaaatattaatccacattgatgacataggtttcagagagcataaaaaactcagagtttttgtatcttccaaatgatttctcttctttggtggaggattagcagttattacacaaaacatgggctgccaacctcaaaccctgcttttaacaccaaggtttcacataatagagtttttagcattagggaaaaagcagttactttatatctaatcataaatatatatgattgtaacaatataatttatataatattgataaaaattaagctgttgcaataaaactgtcccatcaacccaaggtggtatattaccattctgttgacattccattttcaaggatattttatgttgggttgtaagtacagactgacatctatattaataaaccgtatattgaaaaaaggaaagaatgataggggtgttgggtaagtggctttttctagtatggagcattaggctggaaggctggacttcaggaactgacgtttacaaaataccaaagatagtaatgaagtttgttgttgtttgctctctcggctgactttagacagttgtcttcctagtgggattgcttggaaattattattgatgcagatccttccacaaggtctatttaaacctctcccttcaatgtgccactacaaaagaaattcatcttgtgaatgagaggtggcacgtggtgactgactaaattgtttgacatgctcattagcattctcaaacctggaccatttctacctaagctactgacccaatctgtcctgttgagtcgtgctcataggaaaagggaggaaagatgcgagcgtattctttctctctgagaacctgtctatagattcaattatctatctatctatctatctatagatataatgaatactacatatatatagtatttattcttccttctcttttgctatatgtgtaattggcttccctctcttgtacccaaaactaatagtgtctggtattttgtttttgtttttgtgttttttctaagagggagtctggctctgtcaccaggctggagtgcagtggagcaatctcggctcactacaacctctgccccccagattcaagtgattctcctacctcagcctcctgagtagctgggactacaggtgtgtgccaccacacccggctaatttttgtatttttagtagagacagggtttcactgtgttggccaggattgtctcgatctcctgacctcatgatccacccacctcagcctcccatagtgctgggattacaggcatgagccaccacgccctgccgtatctggtgtttaaacatatttcttccttcgcctaacctgtaggacagcaagaaagtagtgacttcttaatgttctcaaaatcgtgttgctgaatttcaagtttcacaatatttagggatagtggtctctcttttctcttttttcagtggctgggaacctcatatattcgctcttgtgtttttggctagcctgtggattaggatgaaggccagataaatcagcagtttgtagatagggtgatcattctgatcaccagagaagtttcaaaagtacaaattcctgaatctacttccagacagccttatttaccttagagatctaatgtagaaatcaggattctgtatttctgacaaagcttccaagattacttttgattctctcacaggttggaaccactgtggtggacctccttttggaaaccaggagactgttggatgctaatgactccttctctaggtttttctctgatttaaaaatctttgacatttggcatggtatctgggtggtgtctacatattgataactaccaggtagggacaaagtaggggcctagtaaatattttgattgatttttagaacatgtgacatatttgtcttaccacaatagtaagcagtcattaagaccttgtctttgaactttatgtcggttaaacacatgattaggattttctataaattgaacaatttgaaaaaatgaacactaaggcttatattactttctttccctccctctcttcttccttccttccttccttccttccccctccctccctttcttcctttccttcccttccctttcctttcctctcctctcctttcctttcctttcttttcttttcctttcctttccttttcttttcttttcttttctttcctttcctttcctttcctttcctttcctttcctctcctctcctctcctctcctctcttttcttttcctttcctttccttttcttttcttttctttcctttcctttcctttcctttcctttcctttcctttcctttcctttcctttccttctttcccttcctttccttttctctcctctcctttcctttcctttcctctcctctcctctcctctattatttttccttttttttagagatggggtctcactatattgcccaggctggattcaaactcctgggctcaagtgaacctcctgcctcagcctcctgaatatattattattattgtttttttttttacacaatattataggcaccattgggtgaactaacctcttgaatggggaaataaactttaatttttttttaatttttaatttttgttggtacacagttggtgtgtatatttattgggtatatgagatattttgatacaggcatacaatgtataataagcactatagggtaaatggggtatccatcacctcaagcacttatcctttctttgagagaaacactcttaggatccttgcacatgtagtcatggcaagattttgttatattttagaattccagacaacatgaagtctagcccaagtctacacagctaaagatcttaaactgaaagttcaagacatgtggacaacaaaacatggttgctaaaatgaagggggcataaataaatgcacatcatcaaagtaagtgggcataaatagaatagtaaggaaaactattaaatagagtgaattgtataaatggaaaatgggaacttacaaggagaaaaacagaagagggaaacgacatggaagtgctttgtttgcctccaaaattatacaaatgtgattccaggcattgtgatgaggagccaggaggaaagaataaacaagaaattataggcacatagcaaaggagagtggttaacatataggacttaggcaatgtagtgcagtatcatgggagctgagaaatctaaggaagaataattaatgctcagctgggatggtactttcctccttgttggattcctggatataaagcccaaagagcgtgtgacttttctgagaagtttcacttagttttcatcagtgttctccattatctgattaaatgataaatctgctttcatttaaatatatgtattcaatgcttgctaggtaggagttacacaggataggtgtctagaatttaaagcaggaatttttttttttttcctgaggtaaacttagaaagaaaagcagaagcaaaaataaaggtaaagagatttaaaaaaaagagacattgaggctgggtgtggtggctcatgcctgtaaccccagcactttgggaagccgaggccagtgtattgcttgagcccaggagttagagaccagcatgggcaacatggctaaaccctatctctacaaaaatacaaaaaatcagacgggcatgctggcacgtgcctatagtcccagctaccctggaggctgaggtgggagggttgtttgagcctggggtggggatgggggtattggggaagttgtgtggagaagggttggaggaggctgcagtgaggcaaggtcacaccactgaactccagcctgggtgacagagccagaccctgtctcaaaacaaacaaacaaaacaacaaacaagcccccctaaaacaaaaggacattaggcatttaaaagtgtgccttattgtaataaaaaaatagctcagaccctcctctagctatttgaatctatctctaaatctttaaaatagacatttttttttaacctgtagtaattcccctgtgatttttagttttgtttggtttctagatgatagatacaccagattcctcataacttatactctggcaataggaccattaggattctgaaagtatttcttcccgttttgacttactaggctttcacatcaagcactgtgacatgcctcagaatttctctctctgtggccaggaatagaacagtctaatacatatcactttcttccctcttgcctgtcccctccccctcatacacctgtaccccatgattcctgctttcatggcagaactgtgactgtgaagttgtgttattcttccagcagtgagcttcaacagaaaggacagggctcctaaaggaataaatttgtatctggttgccaggacctccaatgatctgagtgtggttttgctgtcatcaagaagctcgttttttctctcttccattagactaaatacaaatctttggaattcttgctaatgttaaagtaagagtttcctagacttcagagtttaagtgtagtctcataggacttcagaccttttattattttttcccctggccttttcttatggctatgaatagaggaagttggaatgtatcttttgtgatttgctctcttaccttctaatttgaagagctcctcaataagctagaattgttccaactccaagcttctgcaaaataaaattgtttgtaatcatatacacttttgcattgttggcacatgtgcttggctacttttttaatataaaatacttttgggtacctttcggagaagaggataattcaacaatttatttaagagttgactcctctggagctttaatatcatatcagtttcttaggaaggctagctgctggaaagttaatgtgtgatgaccacgttctctggttgggggttaatgagtgctatgggcattttttgctttaagtgacttgattgggtaccatcttttatggcacctgggaagccaattaatagagaaagtgagttattaatcttttctcagctgtgcaagaaaaagagtcaaaacataacgggtacattcttctaagtgtgaaaaattacccactttgtctatttcatatttcttaaattccaaaattaatgacttttctggaaaaatgcatgtatctctgtggacacagagtttatgaatgcaagggggcgttgctggagagttgaaaggaggacttctgggtaggagaaaaaaacgtacaccttgaaatgtacatttttcatactttcacataattagtttttcagaaggactattgtggagataagctgcttttctaaaagcagctatatttagctgatgctaaaacaggggtgataggtagtagttttgattttaagtcactcataggttattttgctgggcttttggcaattttacttttggttgataaaaccacatctcagatttaggttcctatgcaactgctggaatactaagacattgtagatatagactccctgctggcttcctactgacaggacacctgattggtgacctgtacttcttactgttccacacatttgtatctttcttatactgcttgttctgctaggagcactctcaccacctttacctgggaaaccttgttcattctttaagaatcagctcagtcaccatctcctcctggaaagtcatgactgaggctccagattgagttcagtgcacttctgttataatctggctcctccccttatggaatttgactagaattgtaacgatctgtccctgtgtccatctttactattagaatattaatttttctaggcaatgtgacttacgctgccctagaaagactgctaggatattctaacacccatcacagtgcccaaaaatgttttttgagttcaaccaagaccatgattacaatggaattatgaaggtctgcattcagattccttggtggcagtctgcctagcaggcacagggtagatgaggggagtctgttcccaggcgagttgttggctgcttttgcatgaagtaagatcaagtaagatcagagtggttgtcatttgacaaattcctttcaagcaattgcttccatgtgtcagaaatggttacaacaattgctaccattatgcattaatgataatgcattaacaataatgcttatagcatttgatttcctataaagtatttttcaaatatttgttatatcatttgatactaacaatgacattgagaagcaaggattcctttttattacattttgcaggtgagaaaactgatcctggaatggattcattcattcaacaaaattttgagtgtatactatgagctaggctctgaggcacgggaaagtaaataagacaaatatggtcccaatctacacagagcttacattttaatgggaaagacagaccctaaaaattaattacacaattaattgtttaattacagccctgattagtgctgtgaagaattaagtacgtgtttgtacacataaaagagagaacatgagaccagtggagcagatcttgtatgaagagttagaaaaataacttgtataagggatgggtatgttgaaataaaggaaggggcaggagttatctggggaagggaaatgaggaatcagggcatgggaaggagatttacacctttgagcagctaaaaggaaaagtgtagggaaccctgggagagtgggaggaaacagagcaggtgataggcagatgaaaaaaaaaattagtgggttttgttagtaagaagcacacgaagactgttaggtttgtcttttaccgcaacttcaagcaatggctttgggggaaaatgacttgacataaaaagaggagaagggagttggccagaaaagtaaccacagagcctgagataatgcaaagcaccaaacgttttcagatcttagaagccttttaacacatttaaagatgtttatttacatccctattccatggtgatgaaagctgaccatgagctgggtcatctcaattttctttcctattgagtttcattgtggggtgttcactccaagttttcccaggtcttgttgtagccggtgaaaagctatgaacattctcagcctcattttaactaaattaactagacttacaacctcagtgtcagcgaacaatgaaagcttaccactgaacatataaaacaaaaatgaaattagccagcggtaggagactacaaacagctgaggcattcaattgttagctatttgaaggattaatttctaaatcatgtagagctcccttggtagtttaactagttggacactcaagggtatataaaaacacacttaaagtagaaatgtatttcttcacctataaaatagagatttactggcaggttgtgatattattaatactggatttccttgccttggcccgtgaacttaatcatattttcctttgctttcctcacttgcagtcttgcaactaggtttcaaaacagatactatagaatcaactacatccccagtcaggtaggaggacataactgtctaggtggactgctgaagaattgtctaaaaatctctgcttatttttctggaattctactcttgccctgtgctattgttttccacaccccagatttacacagctcattgaaaattcaaccaggcttaaagattttatttgatggttatttcaataataattatggaggctgccaaactctccttaccctgttaaaaaacaaacaagaaataaacctgccatcataacaataaaactcaccagtaagttgttttcacgatatcttgaaattcagtttggtgtttcttgcaggattggtagacctgttctgaatttacagccaaagaaactcaattaacgattactatcaattatttttgtacatttcaacaacatttgttgagaacccagaagctttttgaaaaagaatgttggcaacttgtattttaatatttcattaaaacaagtccactagttcacctaagtaagtgtttattcaattggaggctaattgaataattaggattgatgaattttatatggagtttttctttttttaaacccaggttagaaggcagctggaagaggctattttctgactgtttcctattaccagaatctctctctatgtatctgtatctataactttccccatccccaaatcattttcaggaaagagccacaaactggcatgtttcttttctttctttatttaaagaggccgaagtgaaagaggaaaaaaaagagtggaatcaccaagaaaaccccaaacaaataaagtgcaaacacagagtgacaagcacactcagactctggattggttatggatgagacgacaagtatatgatgaaattaatgaccctctgtcaactttttagatctcacttttaaagagaatggaccaaaaatcaatagcccccaaaccaccagtactccagtgaaccagtctttcatttatcttgctgttggcactcagatagaaatgcagccaagcacagcgcagagccttcactgggagtcatcatcacaggcaatgttggagcaccccagttaagggtcaaaggtgtgtaccaaggcttctttgagaaggacctgcttctaaataccaacatcagtattcactttattcagctgaagtccatttggcatatgcatatccagtgtttgggttttgagaggctgcctgttggactgatggattcctaacccagcaatagtaacggatggccagggattctactcactctggttttataccttgattcttcaaatgttatatctcaagtgttcagatggcaacaaaatacaactttagaatcaaagtaaagtagacatacaagttttaaagatgtgagtttgtaaggacatgtgatttttacaccatgacttcatcatggttcctaagtagcatagtgtttgaagaactcttgttagaaaaggatcaggtaaaatgtagagtttatattcagaatattatgagctaaagcccagaagaactgtaattgagcaaaagaagaaaacatttaaaacagcagatgagttgtaattgagcttgtaatttttatggatattcttagaagtaatcacttatctccaagattgaattttctagaaataaaattgtttagtatatcatgaggattttcttatggtgagaaagtcatattaaaatgtgaaagataaattaatctacaccaagtgttcaatagctctgttaacagctgaggccaaagtgaaatgaagtgatgtcattatgttaaaatggatgtcgacacatacagaaaaaatcagtgtaaaatgagagagatcacattttgatgataatctaagacaagcaaagtgttggccatttatctggctttgtccaaatggaatttaatcaatggctgtctttaaggtttttattttattttatttatataatgaatacttatagagaacttactgtgtgccagccactattctgagcactttatacatattaaataacaatactaggaatatgaaataacaattaaataacaatactaggaaacagatattattatcccagttttacaaatgtgcaaaaagcacagagaggttaagtaacttgcccaagggcacacggctaattagtgacaaagctgagattaaaacccaggcagttcagccccagaattcatgctcttaacctttaaacaaggctgtcttaagaatgaagaacttaaaacatcagagggaacttaaataaagtacgaatatataggtgaaaagagcttaaattgagaaatttgttagtaataagaattttgtttttattctgattctaatataagtattcattgtaagatttttaaaagaaaaaattcttccacataaaaaagaggtgaattgaggaaacattttcaacattttaaatattaaatatatttggcttgatatttggagcctgacacagtgacagtaaggagagaaaatcagtaaacactaaaaatttactatttaatgtttaatttaatttcttagtagaagaaagaaaatttgaattttgtattctcaacaaagacaaagatctgatgattatgaccatgaacaatggtggagttgctcttcttctcacctgaattgggatagctgtatacagagggaagttatactgtattataaattgatatagaagaaaaataccgtttaaagggatacatatgaccataaagctcaatagatttaaatgaataatatacagtaatccatcagtttcctgaagaactttccccacttttccccatgtaatgccctcctaatttgctttttcaaatccagtgagaattagaaaaagcaggtagaatgagagtgaataaaagtaataagcaatgaatgagggtccgtggtgcttttcgaaaactagagggtgtgagatctacacggcgagacatcctgatggacaacaaggaagattttttggatagtgttttgagattttcttttgtttccaatccaacaaagaatcttgctgttatgaaaaggatcacagagatatgttttacatttaaatgcccatgccaagtgtaactacatttttacattccaaaatttaacagacaactgttttgaaatgctttcaaaacaaaaatgttccgtgtctcaactgctttggaaatgttagcaaaactccaaatgtaaatctttaatatggccatatgcaagaatcctcacacaaatgttgtctcaggtgataataggaatagcatcattaccttggatgtcctggctctgacatccgttgtgctgttgctctcaagggttctttggccggtgaggtgggcatgtgagtcttctcttctgcctggtttccactctgtgggtgtctctcagcaagctttgcagaaacttcgcagattaaggaggaaccttcattagtcaagggcacatatcccttgaagaaaaataggtgaattaaaaaaaatttttttgcagtcgtacttttagttctcctaacaaaattatatttgataaaaatatgataggcatctgcacttgatatctgacaccatgacagtgaaggtgcaaattaccatttaagaggaaacaaaggccatcttattgcactctcccaattactcccaaatccaatggcaattggagaaatgaaaaaaattaaacgtataacttgatacatgtaaatatttaaggttttactatcaaagtagaacaagttacacagaatttctcatatggctacatcatctaaatgaaaagttcaaatacatttgaggatgaccttagagtttaaaatataataattttcttatttttattctgttcccattcatactgattgaagctcatctatctggaggcagaatccacctcccttgttcattttatcctttaagtagagatgacactcagctgcttaaatattgcttaacacctttagcaaaaccagatgccaagctccattttgtacactttttttcagttgaaataactaacttaaccattacaaattagtctttaaaacaaaccatctgaacaacaaactaagtatgcctagggaacagatggagtttttatgttttcacatgagcatcaagctaatatctgtgcaagatgaatgatgccatataggaatctctgcttaatccttccatttcccagtggggtggtttcttttttaatgcccggtgcctgggaaagggagtccatttccttatacttaacttgcattgtaaaattacatgtgtgtgttattttgtatgctcacagacatataaatgtgtgcccacactgtccatgaaatatcttgaactgagcatttgtccaagtgcttcattagcttaaatgctgaaaatgagtttttatgcttgccaacaggaaaactttttgtcctattgaactgggctttgaaaaacagcttcttatttggtaaataaaaattagcctttatgtttcttacatgaggttgttctttaaaatttgcatgttttacaaagtttcatgaacaaataatttagacacaagaaaattttgtttttaagaaattttcaaaataattattctgtaaatcctagaatatagactatatttgcctttggcatatacatttacaaataaagactacctttacagtattcattaatggcaacagagttacttgttgagtttgaaagaaaaaaccccaagcccctatccaagactgtttccagtttttcgtaaggatgttttccagtgtgatacagataagtaaatttaacagcataaaaatttcaagtcttcatttttttccattaagctaaatagaaaattaactgatttgagtgctaacatatgaattcaagaaacacatatgggacatctaatttttgccaggaatgtagtatacactaaagattaatgttgtaaaagcaaaacttctcactccttgctctcagagagctcctaatctagaacattgttgtcttcttttttctctcctgcctgctggcaaagatgggaaagagccctaagtaaaaacatctggctgtctgacattaagcccatcattcagcatgtgtgcaattttctcatcaacagcttagtcttttggtgtaagaataatattacatctatataatgcttgaactctggcatgttgagctgttacctttgattgagagtataggctttccctgctgtctgctggggctaccttcactggctagaggattgagttgttggtagaatttgtctctcactggatctctaggttcatggaaaatctgctcagaggtgtctaaaatttacactttggaatgccaccagggtttggcgattgagagcccagttacacgctagtgtatttggaaatacactagcgaatatttggatagtgaatttggaaagggataacaaagttatataacaaagatgaagaaagaaggtagctcttcttcaaaaatatcagcctattattttttggtgactaaatgtaaacttaaaaagcatggcatgaaaccatctcaccagggttcctactgctcccattggtctgtaagatccttggaattggctgaagcctttgatttcccataagatgccttaaatcatgctttctataaaggttaaagaactactttatcagctaggtgttttgctactgctacttttgcacacacaggcagctgtgattaacttatatgcgtctataacttaccacttccaaaaatttattttttcaaaaatggagagcaatagtttgtgttgttctattgttgtttttttagacctgtgtgagctggttcagaactgctggaaatgtggtacagtgggaaccaagaagcctgggtctttcattgctatttattggctaaatgaccttcaccaaatctctgaaaacttaaatttttcatatttgaaaaataaagattctgtataagcggaggcacagatgtctttgcagtcctaaaattctagagttcttcaaaactttgccatgatgtcagcttcctctgggcaataacactagcctggtgtttgttgacaacttttttatgtaaaaatgtctttctgtttgaacatccatctgcaccatggtttctgtcccagatgatgagtcagataagaccacagcttcaatcatttagaagctgatcattttacagctaatctttcaactaatttagaaaatagatgaagtacgaaaataagagagtaggggtggcgcaagtggaagattcaactctagcagaactgaactgttgtgtccaatatcaatacaccctgttcttgggagaagatccttgatacaactgcttgtctgttttagaaaaaaaaagaaaacattggttttctctaggagctggtgtttaaggctgcagatttactggctgagaaggaacaggaaggcaaggagggcaccaaataaaagataaggattattttccaaaaaggccctggccaactgatacctgaatctggaacatgatctcccatatatcttggactctcccgtaaattaattggttcccctttgtggatgtttttggcccttttcttatttaatccttgtgtggcaccatgctttgctatcacactgccatttcctctttgcactcttgacaaaacctgagtctatggaacctgtaatggacagggctaatgggggccttgttggtacttgtccaatttcttgcaaggagactgaatccactctcagcgagatttgttctgaagggaagaagccaagtcttgccatgtaaaataataaatgtgtttcagataacgtattcttgtacttttttcctagaataattagaacattcatacaaatagatttattttccttgaaatgtatttaattgcctctgttataaatgacttgtaaacatgtccatgccatctaatctttctgattctcagtttgtaaaatgagggtgctgaattctatgatctctaaggtcttttccaactctaaattctatgacccaatacttctattgtttagacaaaaaataggtctgttctgaaatgttctgtaagttaggcagcaatccaaactgactttttaagaattcacataagaaaaaaaaatattctcacatagagttctataggatgaagagagggcccattcactatttgtttgctctctgtgggaaagctattcttttttttcctctttgaacaatataaggaaacaacttatcttttacaatttttggattcagttcatggagggtgtcagtattgtctagtgttcccagtgaggacgtgggagtctgagatcccaggcctggttcccagcttttctgctccttttgtgaccttcagaagccacaaaacaactctcaagactcagtttatctgcctgagaaattgggctcttacttctttaccacagggaaaacctattcttaaacattttggaaaaggattacagcagcctaaagagttaagaagattaactttagtctttcggggtgtatactaacgccagtctcgggtgcttctccactgcctagcaccagatgcttttgcacaagtagtatagggtagagcatcacaggcctaattcagaaactataagaatccaaccaaaatgggcctggcttgaactgcaggtgacccttatacacctgaaacaggtttgctatgtaaagtattagtaaatcaagttgaaagataagcaaatgtaggatttggagcaggggacaggttgagggggaagggggaatacaagcctgatgattttgttggaagcatctacttctatataaacagttatcatttaaattaaaatgaatcttagctacagcttaggctgagcaaattgtcctgcattactgcagatattttcagtaataattgaaaactaaaagcaaacttcctatattatctggtcaacttttcaggtaaaaacacttggtaaagtgtaaagaaagtgtgacaaacttaatattgttttagtgatttctccaaattaacatgaaccagtgaagttttactattgtcagaaacttgaaacaacccagatgttcctaaaaatctcatgtatggagtgggtaaataatattgcttatagtttcatagtaactgcttgactcagaaatagtcaggttgtaaatttcaaatcaatccctagaacctcactgcacaaaacaccaggtcaagaaaataattatgtttgaggtttacggtttaggatccaactataacatcagatcagcttttgtgaataagagtactatttgatcaggattacatcagtaagcatgaaatgagcacttggatttcccaagcacatgtgaaaatgggaaacgctctaaaacaaccttcccaatacaggtagaaatagccattttggatatgtactccttcggcttttgtgtaagggaatcgagtcatcattcagacatgtttaaatgctgcgcttgagctgcttttttgcaaggtgtgaacatgctggagctgcaccatgattcatcatattaaacttcatttggtagaaacattacaagggaataggttctctgtttcctaggaagtgcctctgctctacattacttcctaatcgccctgctggcctctgcccctttatttctttgtagcctctacccttagtccagtgtgcggctacatttggaccagaggcccccatcctgtgaaaaatttagatggctatagcagtaatcaaaaaataccaataaagtgtcaccagtcctcgctggtgatgtgggatggcgggtgagtgagatataaaaatgaatcatgaggcaagacatgattgctgctcaggcaaccatttctaaatgtgagtgcacccaggttgcataaatggttcggaatattctccgttaggccaaaaggcttgcagataacggcatcaactcatcaggctccaaggcccccagggactcgggagcagaagagttgttgctcaagtggcccagccaaaaacatttatatctcggcgctgttggataagtggcatctgctgacaggaactgcttggaataaagttggttttaaaaaataagcaccacagctctctgtgtttaatacaggacaccacagctatatatgcttaatgcaggaagctttctgaggtgtaaagaatggttaagtaaatgagtgggataccattaatcttggtttgtttcagcactacatctttagcagttgaaggcgggggtggaaaagaaaaagacttgctcctagctcataacctgagtgttaaaactgatgtccttcccattaaggcctgtaaactcattagcacatggcaatttatcctcttttatttcttctcaattatcctatcatccattgtatctggatctgattaccctttcccagagtcaaacattatcttgtaaatcatttgctttaagtccaagcctgccattgcgcagcttgggatttgcttaggcaggtaataaatcaattagtattaaacctgtggtgtcatctattttctttcctcgtgcttagaaaaaggaacacctgaaaacctagcttaggttacatcacattttcgtgtatgcttttgaacaatacagacacatttgctcctattccaaggggaagaaaagataagggaaaacaaaacaaaaaaagaaacccaaatcctcagtgagggcctggaagactgatggcattacaggtatgtggccctcatatttcagaggtgacatttttagtaataattgggaatatctattattcaaacatgaatatcagagattccatttaagatgatagtctcaattttatcctcaaaatacagttatggagcctaaaagaagattgtggttcatttttttcttctatttgtcttttatgtatgttctgtttcttagcacacataaaagttggcctgatatgatcagataagaagagtgaataatttttaggtgactgtcctctcttcccctatatattctaaaggatgtctcttctccctttaagtactatactaatttacttaatcattttatctgcactcctggagctaatgcttaatcctttggccgagtttctgaacagagagcccgaccaaacaattgtagctcaaaattaagccctgtgagttcctaaattaaaagaaaaaaatcatctagggtatctcaacaatgagtagcctctcctaagcgctgccccatccatgggctatattaattagtgaagattctggcccttctgctcggggaaggggtgcttggaagggactgtcaaacacatggcagggccccagcaggggagctggttttagctgtggagaacagtggtagagctgtgaacagagctggagaacgatgaggttggagggattggatggcaatgagtaacaactggccctgggtctggctgctgagacggcagccagcccagctccctggatgtactttcctcttatacatcctgccactgacctgcctcacatcagggcctcctgcctgcttccagtggttcttctggtttcagtccttggttttcacattagaaaagcacacccggcgagaacatgtgtgtgttcttcctcctatgggtggagggaagaatcctaatttagtagtttgtttattactaatactggttaaactttcagtgcgtagtattatggtgggtacaggggtcgcagataaccatgcagctatgtggtcccacctttacggaggggatgatggaaagcacctctggaatggtgcaaagtccctcccctaggacagggaatttgaatcgtggagtgggcttgttaaaatgcagactctgattcagcaggtccgtggtgggtttggaattctgcatttgcaaccagctcccagttgacatggatgctgacagtccatggcactttatattttcttttctcatggcaagagtaacttttcagccatttaccatattattgttgtttacaaatgcatcccttatttcccactaggttccaagccccttgaaaatatactgttactgacttggtgaatatataatgattaattgccttgatttgtcaactagggggtctggaatctaaacccacttctgctgcaaatgaatttcgtgacaatgatcactttcactgaaatccccccatctctatattgtacaatgcaaggagcaggtgtggactagaatttgggtgttatttaaaagcaagagcaggacccaggtgtgaatgaaggaaaagactcatgtagtggtgggtcacagggaacccaagaatggatatcatgtctttagggctctagaatttttttttcttcccagaatgtggatcccatgttgccagaccatataaatttccaagaaggtggaaatctgattttttaaattaatgtaaaaatcctctcacttttaagtgttgacaagtaaaataatttttttaaaaggaaaagaaacactgataatgaaatgataacttttgcaggccaaagactgcctagttcgcagcctctggcttggactaggctcaaaagctttctaccagcaaacacataagaactacattcacaaacagcagccacgtcaaaccaataagagcaacattcatgatggacaaaccaaaccaattccaatggtggtttggaagtggctggtgtctcagagctctggacataggatcctgagtttcatatataagactggtggaaggggctgtgcattgagcactggcaggttatatgagctctctcaaaggtatttgctccatgcatggcttgtagttgggtttgttcacatgtttactgttctggaagttgtgaaacatgtttccagtttttgaggtggctgtactcacctgtaaaatattccggaattatgagagtcattctcatagaaataatggggtttataggataatccaaaggaggtgataacccatcaatcagagagtagtaatctttaccttttaacttctatgatccctttaataggaaccacttgttcaactgtcaaagtttttctcttgattcaggtgccatcaccagccctgattagagactactacacttttccccaaaggtggcgcagtataaacgcggagatacactttattttatatggatataaatatccctaaattagggtgtgcactttcttcatataactttatttggttgcagaaaagaattgagggtcacagaagagtattataagagctgcatcttcagtagttcacaacagatccatacctatctatcattttctgatgttcagtttttctgacttgagttctctggagctaaccttataatgacacttagcctatttgaattctttttttccccatccttcttagattgtgtaattgtttcattcacatgatgatgtgtcatgtcctgaattttatatcctggaaaacacgtagtaagtcaaacttgctcagacatgatgacactacatagacatggctgattgtaagaggagacaaatggtttagtcttagatgtgagataaaaattggggttactggcaagcattaaatatttataaagcagccaatctttggtagtcatcagggagtgtttctgtatgaggcgtgtcaggctttataattagttatgggacttattattatttgagttttttgccatgctattttctgcctgtgaaggaccattattttaaatgtgtaataagaagagaaatattgtttgagaaagtggtcacttttcagtttttaaacttttgaataataatttatgtgacagactcaatctagtagtgactttgaatttttttaaattacattttcaaggatagtgttacaccaaaataaagatcatgaactttagtgtaagataaaaataattctaaaggtaggtatcttcatctgtcttaaaactttctccattaggaataataaaaacaaaataaaagacacaaagcaaacctcacattttcttctggaaaacactgtacttttgattcttagcagaaatggccttgtgaatacttacggcatttgtaaatataactaagaaagggctttttttttttttttttttcctgaaagaaagttgctacattaccatcataagtttctaaaaactcttcagggagaggaaaagaaaaaaatcctccaaaccttaataaaagttcccagcaaaaccattagggatttcaattatgaagctgttctcaagactcttgtaaaggttatttgttgaacaatttctctgtaacagtgtatgacaaattactcgcttggcactgtaaatgatgcacaagccctttaattagaatatagcactcgatatctttaagaccttctaacatttcttagttaatattattcctcatgagcctttccaaagaaatgaggacttgtttgtagaatcgaaatgggtgatggaggagggtggacagggaccttgcacagggctgggaatatccagaagccacacaaagaaaggaaggctctgaccccaacaagttttgattgcaaaggcgactctgataacagagttttttttttattatccattgcttttagccttatttaccatcaggctctcttgccacaagcatgctttttagttctgacagccctgaattatggccattgtgggatcctatctcattaactgaaatgggagaataaaacatcaaacaatcataaaaatagtttggcactgtgaaaccacttaggagcagctgtcaaacaggttggaagataaacttctaaataaaaagaatagagacagctgcagtgtcctgccatatgcttcctcggcattatagactccttaataatatgaagtgcccgtgtttatgcagaataggccagacactccatatatgatattgattatgccttaaccccaatttagtaaagaagtactcctccttttcctaatcagatattgcagaagcagttttctgaaagaaaaaaatgtccctaatgccaagccatattttatctgcgaaggctgtggcgggagatagggctttgtcttgactgtcattgtggctaggagcccagttttaggacagcaaggcccctctggggctcttctccagcagtttccatccagcgattcaaaaacatacatctttatcaagctgttgttgtcagacaacattagataattaataggccatttgtcagcctgcacaaaacatgttaaaatcccaaacacaatcaggataaatatagttgcttgctctctgaaggctttttgttctgtcatgcagccattgcaggcagatatttgctattaaatgagactcattattaatcacatctaatgttaattaattaaccacctctgtatattgagggctctctgtgactttcaattgttttaagaagctaattggtaacttagcagtttacatctaagttactatttcccattccattcatgtaaggattttatttggtgaaatatatttgtttgcatttgagaaatttcccttaaaaagccagcagttaaagttctgtgtataactatgcaagaagtgattagggaatgaaagctatggaaaaatatgtagctgccattgctttttctcatgcctagcttattgaaaataattttttgttattttcaaaccttacagaaaaatagaaatattcaactctaatttttagtagatgatgaaaataaggatgatacccagggttagccaaattaggtattcattcattcactcactcattcaagaaatatatggcaagtatgtgtgctcagctattggtcaattccaggccttgtgggaaacctggcccctctgaagccggcgcagaactgcattttagttgtttgaaactgtgagctactagaaagcagggacttgacatccatgatacacatcccctttgtgtctagtactgtgttcctttacgtggtagatgctgagtttgtattcctagaactgaatcaacaaattccaatacaatgtaaatatcttctaaattctgactgactcatgaaggaagatgcataatataattaacagaaataataatatcaacattgatccatcatagatttatgtagtgcatttcagtttaccaatggatttcccatatgttaacttatttaatttttaaaatgttaacttatttaatttaaaaatttttaacaatcatttttgtcctacaaataagggaaaggcgtgtgtttcctaagcagtctcaagcttgacctctatcacttggcctttcaaagaaatcagctttgctctgccagtctaccaagctgtagttgggcatcggccgtgagtagtgatgacccggcttaccaaagcatctgagaatattgattgatgtctattggaagatttgatccattcaaagtttttttaaaaatcgatggctattatttgggaaggactaccttgagggatcacatatataaaaaagcattactagagactagtattttgagaagaggaattatttgaacatttcatcagataaacagacaagcagaagtaaggagaaaaacagttccccatctttgtgctttaaattatcagttagcagtggggctttatgcctcagtttaaggcaaaccatgtctattttaaacatgctcgcaggatagcttttttccacatctattatgaaaacattttaatgtcttctgtaattcttattcatatgtaattatgaatgtctcactaagcgatagaaattttgtgtaaactgtattttacatagaaataaaaatcacaagaatcatcaatggtataatacactaaagacatctctctaaagtgtagcatacaaaatataatttataacattgctcattgagacctagaatattttccctcactatctggaacttctaagaaataggcataagaaagaatgggacatttttccacagttgatgacatggatggtggagtacctggagatatatgtagtgttaaacaaacaggtaaacatgtaacaagcaaaccaaaaacccaacagccaagccagagctttctatctactttcccttctctttataaccactggaacctcttcacagctaagatggttaatattttcatagtacatattcctattcatttttacaagtagagttctttttatgtataagacttttctttacagaatactttttaaatgggaaataagatgctgcgcacttgtgaatatcacattttgcttttttttttttcaccatcttaaataaagtctaaatgagagagagacagagagaagtattttcagtccaaatacatagggcatgaaaatctcacacacacatgcatagaacaacttcagagcttaaattgttttatccctgttgaagggctgttgttgaattatgtgtagggtggagaaagatgactggattaaaaaaatgtcctttagctaacaaagatctagattggaatttaacttgaaccagtttgagtgatattccagaggcttttattgctggaaataatattgaatggaaaacagttaagctaagtggaaatattttatatcataggatgccatattctggattataattatatggcttttgcattcggttcccattatgaacttgtgaaagatccttttcttcttatgcagagccttggcctcatttgtaataacagctcctgatgcacagcttttgtgaaaatttctgcttttacttttttaaggtaaactcagtggtatgtacgtgtaaggaagtagggagattggccacgttgactaaatccattgtcaggatctgtgtgttttcacgctctctctctgaggtaaagaatgaaggctcccttcaagagaacacagcgtgactactccaactgtcttctctggcctcttttttgtcatcattttttttttttcgttttgtcctgaagatgtaagctgctgttgtctagagggagtggaaaaggtttttcttagggatgttaatttcaaggctgagtagtttccagtcaccaggccttgctggaagtttccttcaagatttgcttggaggcagcaggggcctatttgtctcacctgcaaggaacatggccttaaaaaaaataacaagaacttttggaagcttttttaattagcaccttggagtctttggctttagactgctgatttgttaattcttgtggtgattttcttcctggtgctgtgtgtttaaagtactaaatcgtgaatttcccgtacagtcttcaaagcttttcactcaagtggccaaataggtttacgttagtgtcttgagcatgacacatatttcagaaataatatttgttctggcatagcctaataactataaaattgagatgcaaaccagaaaaaatttctttaaagtccgtaatgccattttagagggaaatattctttattccctagacagagtaagaagctgctcttgtccaaattatgagttgtgaaaccttcagacataaaagaaagcaaaattgttgacatgttattgggacataacttttctccccagtgtttctttgttgtagagagaataaggaaaagtaaaacagcagcaatctttctacaatattcttacagaggaaaaagaattagagggaatatgctacccaagtttacacctgctttgtaattctttggtctccagtttgacaccattaaggaaagtgaggatttcagccaattacagctgatggtttcattgtatttctttttttccgatggtatcacatcctatatttctttacgtattgtctcagacatacatgcatgtagttggataatgggatattcaacatagcttaccgccacctcaccaaattattaagctatttcaaaacaagaaataatgctgagggaaaatttgtattagcttgattgattatcttattttaatccatattaaagctttaagtctctaggcgtggctctttacttctaacacctcataaattatagctataatgaagcagtcatttatcctgagctgatgataaatggcttgccctaggaggaactaaagaataggcaagtagatcattttcatatttggtgaaaacaatattaagtacccagacctcagtgattgccctaataaatgaataatctgaggtgaggggcttggcagtcagtgtaaaaaataacctgagctttctctgtcatttgtcaggctttgctatgacagcatgcattatgggtaaatgagcaatcagcaagaactatgttatggctgggatgtttttgagaaatttatcatatgcattgcttagtaccttaagaccttaaggcttaatggctatagtgcatgactgcaagtgagcacagttcctatttaccatggtatgcttcatttgtgctccatctctcaccttaaagaaagaaaagacctttcgtgattgagcttcatttggctttgctttcaaaatgttaaggtctttatatgatgttctctctgttgacagatactactcctggtagattggctacaggagattttggagtcgtgatttcaaataaaatttcagggtcaaaaatttatcatggtatggaggtgtcaaaatctggattccagtgtacctgaagccaaatgtattatggaaagtgacattacctccttataatagtattaaatatttaatggtacttaagaattaaatgattttccaccctcctcaaaccaccgaacagttgatctctttcatttattacggaattggaaataatcaagagtagttgagatgtgaatgcttcattggaattatgcaatgtgttatgacaatgtctgactcattatggtttgctgccatatgcagtgaaaaaggaaatcaggatgcaaactcctcttcccaggccaggggtctcacatgcacactcctgtggatgctattctaaaatatttgattaaagataatgtggctttaccagtacctctcttgccataatatcccaaatttacaggtgcctttgaagttagatgtacactgaattaaaaatctggctttacccctagttggataaatttgtttattagttactctgaacatcattttactcctgtgtaaaatggtgaaaacactgtcttgaaggattgttgtgtggcacaaatgagataatgtatagaagatgcttagcatgtgatgggcgacctataaataaatactaagttagttctatatcttcttaaaatcctggtcaggcacctaagcattcccacaacgtataacacgagtggcattttacaagatatggtagcaaggctagttgctcagtatattagatcaaggagctcatgagacaaattcaattacatgaaaatattttttgaatgtctactataggtcaggttccagtgatgacctaaagatcacctcaccattggttgccatcatcactataatagcttctaatttctcccctctcctagctctcatccatagcagtttccagttgaatttccaaactacagatctgatcacaccatgactcctagttgcccagccatttagcaccacaaacaagggtttaaataatacacttctgacttaccatttcagcttcatttcttgccttctcttttatgcctatattccagctatgcagagttactcaccaatctttcatttgtaggtcacatttgtgctttttctttgcctagaatgtacttccttccactcaactgtcttggcatggccaaatccttgttcgagatgtatttcaaatttgagctctggtgtgtagcctttccagtctttccaggtggagatggtttttcttcctcttagttgtttcctgaatactttgtgtgtaataaaccactcatcatgttgtgctgtaaacatctgtttgtgtgctctgcttcccactatggattccttgaagacagtgacagagttgacatttttacttctagaaattaacatggtacctggaacacagtagacgctttataaaggtactttgtaaacataagaatcaatgagaaaggtatgattctgcctttctttggacatctcaaactcagagtcagaaaagttcttggtggggggagatagtagataaccatccacctcttcttgtgatcttaacctacaaagcctcacatcctgcattattcatctgttccctcccccagtcaactaaaatttacaaaatgcctgctttgcctggccaccttctagctactgaatgagaaggtgcatttttataggagaagatggaggtggagcaggagaactctagggcatgggtggcagagggcaccaataagacttaattcttccacccttgggaattgtagacatcttcacaaggggtcaagaaattgggtggttcagagcaatttcttttacatctcaaggatgaggacgacttgaactaatgtagaatcttctagattgtagataaaatgaaggagttggatttcaatattttacaatgaggatcccttttcataacataaaaaattcttagacctgtaagtatttatttgttgacaaaattatactgaaaaaaataactgaaaattcagtaactgttaattaattttccacttagtgaaccacaatggcatgtgcagggagtgcctaaagcttggtgcaccccctgaacaagccatcctgatagggatgagggcagtagcactgcatagtcattaggagcatgggcttttgaatcaggcagacttgggttcaaatcttggttctgacaccaggtatatgatcatgagaagctctctcagtctttatttccttaactgaaaaaacagtaatagtgacctcacagtgggtgcaggtgtgggatttaagataataaaggtagataaagataacgcacaacacacataactactacccacttaattatcaggaaagggagggtagcttagcaagttctatgatgtaaactcagggcaaggtggctctgtggaagaccaggcttatttgtgtagcgtggagagtgtctgtattagttcggttttatgctgctgataaagacatatctgagactaggaagaaaaaaaggtttaattggacttacagttccacatggctggggaagcctcagaatcatggcagggcaagtggcaagagaaaatgaggaagaagcaaaagcggaaactcctgataaacccatcagatctcgtgagacatagtcactatcatgagagtagcaagggaaagactggcccccatgattcaattacctccccctggttccctcccacaacacgtgggaattctaagagatacaattcaagttgagagttgggtggggacacagccaaaccatatcattccacccatggcccctccaaatctcatgtcctcacatttcaaaaccaatcatgccttctcaatggtcccccaatgtcttaactaatttcagcattaactcaaaagtccacagtccaaagtctcatctgaaacaaggcaactcccttccacctatgagcctgtaaaatcaaaaacaacctagttgcttcctagctacaatgggggtacaggtattaggtaaatacagccattccaaatgggagaaactggccaaaacaaaggggttacagggcccatgcaagtccaaaatccagtggggtagtcaaatttaaagctccaaaatgatctcctttgaatccaggtctcacatccaggttacactgatgcaagagggggttcccatggtcttgggcagctctgcccctgtggctttgcagggtagagcctctctcttgactgcttttatgggctggcactgattgtctgcagcttttccaggtgcacagggcaagctgtcggtggatctaccattctggggtctggaggatggtggtccccttctcacagctccactagaaagtgtcccggtagggactctgtgtgggggctgtgaccccacatttccctactgcactgccctggcagaggttctccatgagggccccgtccctgcagcaaacttttgcctgggcatccaggcatttccatacgtcttctaaaatctaggcagaggttcccaaacctcaattcgtaacttctgtgtactcacaggctcaatgccacttggaagctgccaagatttggggcttccaccctctgaagccacagcccaagctctatgtttgttcctttcagccatggctggagtggcttggacacagggcaccaaattcctagactacaaacagcatggggaccctgggcccacccacaaaaccactttttcctcctgagcctccaggcctgtgatgggaggggctgccatgaaggtctctgacatggcctggttacattttccccatggtcttcctacttatgcaaatttctgcagttggcttcagtttctcctcaaaaaatgggtttttcttttctactgcatcatcaggctgcaaattttctgaacttttatgctctgtttaccttttaaaatggaatgcttttaacagtacccaagtcacctcttgaatgcttttctgcttagaaatttcttctgccagataccctaaatcatctctctcaagttcaaagttccacagatctctagggcaggggcaaaatgcctccagtctctttgctaaaacatagtaagagtcacctttgctccagtttccaacaagttcctcatctccatctgagaccacctcagtctggatcttactgttcatatcactatcagcatttttatcaaagccattcaacaagtctctaagaggttccaagctttcccacattgtcctgtcttcttctgagccctccaaactgttccaatctctgcctgttacccagttccaaagtcatcgggtatcttttcagcaacaccccactctactggtaccaatttacttgttttcatgctgctgataaagacatacccgagactgggaagaaaaaaaggtttaattgagcttacagttccacatgactggggagacctcagaatcatggcggggggtgaaaggcacttcttacatggtggcagcaagagaaaatgaggaagaggcaaaaacggaaacccctgataaacccatcagatctcatgagacttattcactatcacgagaataacacgggaaggaccagcccccatgattcaattacctccccatgggtttctcggacaatgcgtgggaattctgggagatagaattcaagtggagatttgggtggggacacagccaaaccatatcagtgttgctcatgaaaatttgatggggagtgtctagaaatctgtgacgagaaggatgggctatgttgtgacacatctggtaaaggctttcaggtatcttccttgatgtgagaactgagagtcctcataagatttgggagtaagggcaacaagatcaaaatgatacttcaggaactctgaaaaagatttggaagtagacggtaggaaagacagggcaaaggataacttaaatatgtttccaaagttatctgctatcagtacgaagaaagagccctgagatgcagttacgagaaacttatgaaagagtgagtttggggatgaaaatatggggattataagaaattctctatttagtgggatttgatgtgaaaagggctcacagacctcaagagagtggaggagccagagctaactgtctagtgctgagagtcctcttctgtcctcagagagaactgaagcagttgttcagagtagctggacttttccctctgctcctcagggagcgattgctaaaatgaaagcccaaactgacctctgctgtgttttcagatgagcacagcaagcatcagacccagcactgtcagtgggaaacagcggaagagtattgacaggagatgagcctgttcaaacaggataatgaagaataaaataaatgccatgggattggataagatggaggctgttggcaaagtcagagaagggcttttcatggaatgatgggaacagaagacaggttaaagccttaactatttgagggcagatagagaaggcattctgttttttgttttgtttccctgcttcttaacactgtgattggttcctaagatgggcaaagatattacaatataaacatgggtatttaatgcaaacctatttcataggtcacaataggtctgggggtagattggggctacatttcttcccccttcccttccccccacagagagtagtgcagcgccttaaacaccacaatagttacaccataaatattttatgactgagtgagggtaatgaagggacctaatgtgaggggcatgaatggaatctttgatggtggcatttggaagagagtcaaggagcctgctcacagggaagagaccccactggaatttccattagcaatatattcttttccatgggataccaagaaatttcaaagcagattggaaggagagaaatcccagttctggtagatactttcaaatattatgagtagaaaacataatctttataaactcattgtgaattttttttttgatgctgtggtggaataactcctctttcaaggggtttattcactgaaattcagcagacagttactgagcacctactgaatgttagacactggactaggttctgtggaagtgttgaaaagaatacagacctccattcaaatgactgtaatacaaagcaatgtattagggccataaagatactactccatttgaccaattctgtattcagggtcaaaaactatagataaaaaaaaatgtgaaaacctcatcgatggtggtgtttccaaagttatggggcaccttgagtccagtagtagaaaagagaccacaaaaactgtttctgtgccttcatctgcaatagcctcacttttagaaaactcttcttatttgtttgttttgcctgtttgcctcttttgatgtctttattcttccactaaaagttagtggtgattgtctctacaatctccttaatatatgattctttgacatgaaacatctgaagcttcctttcctggcatggaagagattacattagtatacccacctaattgggatacttacctgcctagtcactatggatatttttatcttgttactagcaacctcttatgttttctgtgcttactagaaaataaaagcagactattaaaactctctaattcatactttaatggcatatagaagttactcataagaagtgtaacacaagcctgggcaaggtggcttacaccctgatcccagcactttgggagactgaggtaggcagatcatctgaggtcaggagttcgagaccagcctggacaacatggtgaaaccccgtctctactaaaaatacaaaaattggctggatatggtggctcatgcctgtaatcccagcacttttggaggctgaggtgggtggatcacctgaggtcaggagtctgagaccagcctggccaaaatggtgaaaccctgtctctactaaaaatacaaaaattagctgggtgtggtggcatgtgcctgtaatcccagctactcaggaggctgaggtaggaaaattgcttaaacctgtgaggtggatgttgcaatgagctgagattgtgccactgcactccggcctgggcaacagagagagactccatctcaaaacaaaacaaaacaaaacaaaacataacaaaacaaaacaaaacattagccaggcgtggtggtgggtgcctgtaatcccagctactcaggaggctggggcaggagaatcacttgatcccgagaggtggaggttgcagtgcactgagattgcaccactgcactccagcctgggtgacagagcaagacccccccttttttaaaaaaaaaaaaaaaagaagagaagaagaagtgtaacatagctaaaaaaagcatcttttatttctgatattcccatctgccaaaaattttatgcatatttgacataattgcagacaagtccattgtagcaactaaagtctttctacatgcacgtaataccatggtgttatctgagatttgagatgttgtgcatctcagatttgctaaggaaatgtaaaatgaacatttttctgtctcctatagtctttctattttttgataaagatagaattcttgggtttggtgaaaaggacatatgcttactagtatatgtcagtgaatgtgctaacaggcttgtactggtacagagttttaaaaatgggtatgattcaaatagttaagttgctatatacactcaaagtattgtttggtgatagaaattattattattgtaacatttttcatttggtacaaaatctttgtcatacagcacagaaacgtgaatatcttggttgcgctgctttagagatgaaggttctgtccaaggcaccagtggcttgaatttctcctggagggccatggactctgtctgtccactcagctcaggctgagctgtcacatcagccagcttgggaaatggctacacgtgtgtctacccaggctgcccagagcaatgtccaggattattagactcattgttatctgtattcctcatgtcagtgcagtttctgctcctctagattatttaaactatttgggaaattaattgtgcacctaaggtattgtcagctctgcagataggaggatcagctggcctctgtgcctttaatgagatgaaattttctcaatgatcctggcatttaatccttggtagaccacccaacatgaatatctcttcatatccagaggtgattacttgactcttgggtctggggtgagctgtctaaactggtggagagaaggggctagttgtgttcaatttctcatctccccctcccaacatcaccaatatgaaggggaaagagaagttgtttccttcagaagctttggagggcatatggtttatccctaaaaagataagcaatgataacaggtctcattacaagtatgacaattgtaacttgacataaaataatccaaaccttgtcaattcactcaattgcaaactatttagagtgttgtcttcccccaccccaaccccactccctcctcccaccccatccccaacccttctagcaccttacatgccaacaggcttccatcttccttcaatcccttgctcattgggtttctcctgcctggaatgcttttcttggacctccacttggcaaattttactcatctttcaaggcttcctccatgaaaccttccttggccccagcatgggctccacaacccctctgttttgattctctgtctattaaagcatttcgcatttcaacaagaaggcttccaaacaggattgtgagctgtgtacagccaagcaaaattttcttaattattattattttattacacaattcttgatatattgaaaagaatatatatatacacatataaaacataacatatatgatatatgtagaagtaatggaatataaaaataaaatgaacacttgtgaactcactacctaactcaggaagtggaacacaaccaaattattttatctctctatgtgcattttccctatttcattcttctgccttactctagaagtaagccctcctctgaactttaatcattcttctactttaaaaaatggttttattgcttatgtatgtattaccaaacaatatattgtttggctttgcttgtttttgagttagaaattttttcctgggtcttgcttttctacatgcaatattttgtttccaagattcacccatgttattcattttcactgttgtataatatttcattttgtgactataccaccgtttatttattcattttcttgtggatgtgtcttttgggtttgcagtttttcatataaggaatgtggacaagaacagcctcaaacatgtcttctagtatgtacgtacaagactggaattggcatgtcagggatatagcacaagatagtacaatattgtttggaagtaattgtgccaatttacacacacatcagcaatgtgcaagagtttctgcattcttcacatgtttataccacttggtattaccctatttgcccatctaggagatgtaaaatactatctcattacagccttaatttgcatttgatttcacatgtttgtggaccttttgtgtttcctatttagtgaaatcctgtttatgtctatggcctattttaacattgagtttttgttttagtcttatttattttagaagtattctggatactaatatattctggatactaatatttagttaataatatattaactatattaatattaaataatattaataatattaatattctggatactaatccttagttaattatgtatatttttaaatatctttcctagtttgtattttctttccttatgctatctctaaatgaacagaaggtcttattttaatgtagtctgttttattttagaagtattctggatactaatatattctggatactaatctttagttaataatatattaactatattaatattaaataatattaataatattaatattctggatactaatccttagttaattatatatatttttaaatatctttcctagcttgtcttttctttccttatgctatctctaaatgaacagaaggtcttattttaatgtagcctgttttatcagtctttgcttttgtgggtagtaatttgtaggtcttgcttgagattgtttttaatttatgttttaatctttgcccccagcacccaacctagattcacaattacagtaaattttggttgaaaataatgaattaataaatactatggacagaagattaataaaaagttgttttatttgccaaacacacatggttttaaatgattggatcgaacactgcatattggaacaagaaaacccgatagtacctgaaacatttcttcacgtgctggctgtggccatctctatggccagccagtaccccatccatatcccttcaccatttctgtgcatattcacgtgacttccaaatgctttgcctgagactgcccggccagagcatggggcaggtcagaagtgtgaggaattacatcccctgggataagctctcaacaaatgactgatgggaatcggtggataaaaccccagatccctcacctcagctgtgctgatctagagttccctagtgctaactcgattgatagcacaccctttgttgacttctggcccttctctgtctcactgcatactcccttaacacacgtttcctgggaccacctctgaaataaactacggactcttgaaccattgtctcagggtctgctggtgcaattaagaatgtttgaatgtcaaattttgactcagaaacttgaatacttatgatttaggattgaataatctttaaaaaaaaaacaagcaaaatgttcttattgttatcctgtaattgggcagctattactgggtgaagcccagagtgagaaggtgtatagtttagggataaagcgcgtgggctctagagctagacaatcagggtttgaattatggctgtttaaaaatcatttattctttttcctaatattactgcttcaatttccttacatataaaatggggatgagagtcatatctacctcatgggctattatgaggattaaatgagctaatatacgtagagtgctaaaactagtgtttggctcatggttgtgtcgtatactttcctggagccattgaataataaaacatcccttgatacattttaggaggatgagatttttatgcatttcttgtcactctatatatgacattgcaattaggctctgctaaaagtttaggaagtctggtctagccattcaaaaataactttctaattgcttttaaggaaaaagttctaatctaagtgttgaactctactctgagaccccctttagcacctggagagaaggaaaaatgccatatgaaaacacgtttctctataaatctacgcttttcatttttctttaactcaagaatagctttacccctatttgctgggtgttacaggtggacaagagggaaatatataaagaaggtttttgtctccaagaattacattccaaaaagtttgactctgttaaatggagagagttataatttgaatctctgtggttatcaaagaaggtgcttttgtgaatattatgttaactaatcttggagattctatcatgggatccggtttgagttccttaaacttttctcttcttatgactaataattgcaaaaaagttaatatttgaatgtctcctatacgtttaacaataaaccttcctgtatagaaactaggctttatctgagacccaatttaatagattgattttagttaaccaatacattttccttgcatttcaaagtatttgggacacagcttagttcaatggcaagttaactggatttgaagccagaaaatctggcattgtccacccccaattagatttatgacagtggagaatattagtttaatattgtaagccttggtttccttatctgggagatggagaaaataatgaaatctagttacagagctgtgtgaatcataaagtcaaatacaaaactctaattggttcataaaagattttattttactcacgagacttttaaagtactctgaaattatttttagccgtagcaaaataacttcttcataattttttctcttttattctctatgattccagaaagaaaattacccttaaaatatattttttctaatgaataaaataatcctgttatgtcgttcaagctcaagtattttcagttgtattgacttggactctttagtcaaaacataaaaacttattgagaataaaaaatttccaaaaatttttaatattcttaatccagagtcatatttgtttttcaatataaataacattgaatatttatccaattcagtcagtctaacacatagtttttgagccctaattatgtgttagttactgtattaggcactgaaaagtgattgaaaaaaaggattttttatttggcaacatagtatcaatgtcaaaagagaaaactataatttcaccattaattttgctaatccaaatcgtattgaagaaactgacgtgtagaaaagccatttagggccaggcacggtgcctcacacctgttatcccagcaatttgggaggctgaagcaggcagatcacctgaggtcgggagtttgagaccagcctgaccagcacagagaaaccccgtctctaatgaaaatacaaaattagccaggcgtggtggcgcatgcccgtaatactaactagttgggaggctgaggcaggggaatcgcttgaacctgggaggcggaggttgtggtgagcggagattgcgccattgtattccagcctgggcaacaagagcgaaactctgtctcaaaaaaaaaaaaaaaaaaaaaagcgatttagccagaatttcccttttttttttgcgtcatagactcagaaccaattgcaaaacataagcacaatgtgatatttcttcctcagctatgtaaacaaagacgtgcatacaaataaggggatatggatcttcttaccatattcagaaatagccagttgtagtctgttttttatgtcaacatattgtgaaagataattgaaattccagcaagtgcctatgttattaacagtggagttgatgccattataatcttgtaaacatccagggaaatacagccagatacattgaagaatgatcaagttttgtaaccgactgtagtgcttaataatgttaccgttttggtccattattggaatattgtatctgcttgaattaatgtttataatggcactttactgctattgtctgcttgtttttatactgatttatgtggttattagactgaatgcaatttatgttgaattttttcaagaaatgcagtttagcagaagcacaagtcgttctaaataaacggaattaagaaatcaaagatacagaagacactagttttggccctctaattgtctacagcaagaaaatatatattttaaaaggaaatatgagttcacaagaagataaatagacacataatccagaggccagttgctggcagaatttcttagtttgatgtgactctctttttgacagttctcctaaggtaggttattttggagaaaacatatgtttccattttctctccctctgcttccctttgggtccccaggctccactagggtcacagaaacattaaggcttttgtcactgtgattaatagctcttaagatcatctttaattcactcactaatgactgagggtctttctgctctccaagtaatcgggtgatgtatgagccgatagtacaccttgtggcagaggtgaaaatcattcaggcaatgcaaatattgtcacgggaacaaatgttttccctgttaataaaaattaatgaattctacccaggagctagttaaggaagctgtggcgaaggaaatccaaacacaaataacttcttactgttaaaaatcacttatgtattttttctagatatagaaaaagaccatcattgctgcatatttccataagagatgaaataatgacaaactatagaaatgcactatgttgtttttaaattatctttttcaggttcttgagtttatttaaaattgtgaactttggcatcttatttgttttaaccttggttaaactacaggcttcccatactgtactagcctaatgaatacattcctcttttcatagcctagttaggaccaagaattatagtggtcagggtttataactataaaatgatgtaatgaagtttaaatttgagaaactccttgtaacacatcataaaagattgatgaaacagactggagattaataagtggttcaaatagttttgagagaaaaaacaacaaaaacatttaacactatcattatatttattgaattctttaaaaataaaaacatctcctctcttaaaaatttgcctcacatcattaaagctttttccttactacatctacctcaaccccagttcattttgtaagacaataaatgtacaatgttgtgaggtgtgcctgctctttatgtacagacacttgctatagaaataaatctgctgtctttttgtttcattttgatagtccatgattctttcttctaatgaccaaaattcattgtctcaatggaataaatatttctgaaatagctcccagtccttcccctatcatttacatcttagaacaaaacaaaaaaaaaacagtaaactttttatacatcattttacctctccactgtgcttatctacaaaggaacatattactgaggaggaaaaaagctcaacttgttactattatttctggtaggcacccaaggagagtagctaatttgtttttcatcaatgccaaggacaaattaaaacaaaaaacctaactgaattatgcatttatatgtgcttgcttctaaagtatgcttattttccccagaatgttcaaatgaaaacataaaaaatttgactgtatatttgtttagtatctcagaatctatttatacaatttttaaattaactgaattttaaaattattgaaggacatgtggtattcattatctaaataaactaaatttgaaaaatattaaagggaacataatcttaattatcaattacgttttgacacttggagaatgggtaaaattaaagaggcaatttctgccacctccccattattaagaataaacccttttttttcccagatgaattcagataacagctctccaacgttaaacttggaagtaggatttttctctagataggtgcttctccaaatgtgatctttgaatctcctgcgttcaaacatttgaaaggtctcaccctacagtcacagtaaatctctggggacaagccctgtgtatttgcatttttaacaagcactctagatgatttttcacaaaggttaaaaactactgctctcaatgttattgaaagaaattttctttctttcttttctttctttctctttctttctttctttctttctttctttctttctttctttctttctttctctttctctttctttcttttctccttccctccctccctccttccctcccttccttccttttttccttccttccttccttcctctttctttcttttctttctttcattctgtctgtctgtttgtctttcttttctttctttcattctgtctgtctgtctttcttttctttccttctttcgagtttcgctgttgttgcccaggctggagtgcaatggcgtgatctctgctcactgcaacctctgcctcctgagtttgagcaattctcctgcctcagcctcccgaatagctgggattacaagtgtgccccaccacacccagcacatttttgtagttttagtagagatgaggtttcaccatgttggcagactggtttcaaactcctgacctcaagtgatccacccgccttggcctcccaaagtgctgtgattacaggtgtgagtcaccatgcccggcctagtcaaagaaatttcatcatgacaacattggttctaatatatagaatactttttttccatttacataaaatgaattttccacaattgggtctcaccgtttctataaacttttatatcttacccttgattccaaaagaaaaatgttgagtttacacagcttcagtacatacctggtgggtaaagggtttgggcaagtgcagacagcaaggaaatcaaatatgagctttttgcccagagaagttctaatcacatagtaaacagttagaatttacacgggtctttatttaattaagcctgagaaccactatttagttgcagctggagcagaatcttggcacagaatagaacaatctactgtagcctttaaccttttcccttttaactgtgcttataagaaggtgtgtttctttaaaaaggtgctgcatatctttaagcactgtttgtagtctttgatataagggtcacctcactgtgcacacattttaaaattcaatagtaaagaagaagaatgaaatagatgtatagcctaacagggctttttgtgttctatgaggttgaaataatttatccacatgatgaaccttcatattttaaatgttttctgtaatttttaatgaagaaagtatatgtctgtttgtgtgttagagagggagacattgacatctgctttactgtttcataagtctttgagatcagctaaggctaaataatgagaagaaaaaaatgacagcccggcacagtggctcacgcctataatcccagcactttgagaggctgaggccagtggatcatctggggtcaggagttcgagaccagcctggccaacatggtgaaaccctgtctctaccaaaaatacaaaagtagccgagtgtgatggtgcacccctgtaatcccagctactcaggaggctgaggcaggagaatcacctgaacctgggaggcagaggttgtggcgagccaagatagtgccactgcactccagcctgggtgacagagcaagactctgtctaaaaaaaaaaaagacagtagtactatcacaaaaatgacagtggaactatcacttttcttcatgacaaagggagagaattaaacaagattcatactaggtctcgaactgttgtctctctggcctacagtcagtttgtagacacatgtagtttggctaacacaatgtgaaaaaaaaaaaggtgaaaaacctcaccccaaaatccaaatttctgatttatcttgaagtatcagattatgtggccatatcaaaccagttttctccatggcaacactcagccatacctgatagcagctccctcctttagatggagcatggcctctcctaaccccttggtctgtgccatctcgtgttgccttacacctcatttacctggtatgctggatgctcttagccatttctatatgtaagtactaattcatgctactgaattgagaaccccaaacaggagaatctaaaaatctcacaaccgtgtgtatttggctttaggatttgtggcagaccagtctacctaattgtatttaccatggaaaatattgaaattagtctgtgcgactttgaatctaatcaggtgagtaaatcagggaatccatcagggaattacaaagtagggaagttaacttgagctcaaagtttgaaataagggcttttttttcttgtggtaccatttggcaacaggtcaagggacctttatttcttctatgtaggtcttagagacctataattctggaagaccccggttttgataatgttctactagcaacggtaagccagtaggcagtgccaactttagaaaacaattatcaggacatctatgcaaggtatcgcagcctcttagtaaccacaggaagttcccagcctctcgccacaagcttgagtttccaaggctgacaggtccctgctactcccttcctactcctcccacttgaagaaaggccacaagttcagatttccccaccagctaatgactttgggtttgtctaactctggctgtaagctctttggcatagttcaaccttgcttctttcagaggacaaatcttatctttttattagcaaacaggatggcttagatatgtctttataggacatttgctggagcataatttaatatgactcatttccccttatatataaagacagtgactgaaacagacaaggggaaaaacaagcccaaaaatgttattagaaacttgcacttgaaaatgtgtaaaattctactgcagctgggggatttatttagaatgacttggcattctttgcttggatgtctaaataggccttgtgataccatttttggcctcactttgaacctagtgtaataaagaaggaaatgaaagcaaaggtaaacctaaagtattgttttactctaaatgctttcagtaaagggtcttgttatctaatgattggtactagatggctggtataaatcgtatggtctgttctttgcactcatggctaaaggaggcaaaggcaaaggaaatcaattggaactagcaggtaacaaatgaccagtcttaggcaaacatagcaggtagggaaaatagacttgtggacacagattactaggaaatagtgcgggaggcctttttctccttattcaaaatccagtgcaattatacaaagtaactaattagacaattatgaaatacaggaattgttttatctgttaccactgtaagcctagaacctgagagctattagttttccaagggcctaaaaaattacttgaaaaaaattactggcttaaaaatatgaatgaaaatgataaaatcacaattaataaatgtttattaatgtagtactatgtcatccagtccagtataattcaaatcatctagagttgtgttttaattatgttaaatatagagtgtggttacattttaatttttgatataacataggatgcagcttccaaaattaagtagctaggacaggcaaaagtcttaaaatggccctgatgaaagattgcattttatagctatataacattttctgccagaggccatccagaatattggaaatgaggatttattgaaaaacaaattacctttagctagttctatgaatggaatagacttactgttcaaagtagaatcttaccagggaaggcatcaatgaacattctacttctaacttctctaaactcacgccattcttaatcatttttcaaagtttattttcttcttttagagttaagtgcccttctgcaaagtacaagtcaagctatatctttgaactttcagctgtaggagagacagtgggactctgcaacacagagactacctgattctgcatttatgccattcctcttgctttgttgttgaggattttttatgcacaatatcttatttgatcttcacaacaatacactgacgtagagaagtggtaatatcattgactctatttggccaataatgacatggagactaagagggattagtgacacagtataaggtatgcaactattaagtgtggaagggcctggaactaaaatcttttcatgttaaacccattaaacctgttactacatctagctactggacatgtatgagttaggatatttctagagccgaattttcaagatgttttctccctataaactttacatctcatctggtagaaaatatgtttactcatccatgcaacattcaggcaacaaatatttgttgaacatgtgctatgggtcagatagcatgctagtctctgagcttgtgatggagaataagatagatacattccttccattttgcagcttgcatctgaggttacattcactgcttagactgaatctgagtcaatgtaatctattctttatactgcaaaattatttaattaaaaaagtgaatcttctctacaccaaccctaagacagacagatacacacccacacacgtaacacctatacacagtggtttaataggaagcttgattgaattgtccagcagtttggggatcctatagctggaatgacaggaaaagcttatatacagcatatctgatcaagtattctgagttttcattctggctgttaccacagcattttatattgacaaggaagtttagagttgactccagtctctcatttcaactgacactcatgatatcttttgtatatccttagctaaaattaattatattctgcctattgttcctgtggctctttggttataccacattcatatatttttggctttgttttctagtatccaagtgtctggctccttctctagactatgagcttcttgaagacagagtctcttttcattttctttgcacctttcttttatttttttcccttcccagtgcctagcacagagacttccaggtgatgtcagggtgaaaacccagaccaagggcattgacctttgattccaatcccttttaccacaaaagctctcattcttttagtttgttggtctgaaaaagtagataatagccttaagagttttgtttacaaaaaataatttgaggtaaaagatattttgcaagtagaaaaaaggtacaatagagtgtgtatgacctcatgagcatattcttttccaacaaattttaagatttatatattcatttgctagggctgtcataacaaaataccatagactgagtagcttaaagcaggggtctgcaatcctgcagtaccggtccacggcctgttattaggcctgttaggaactgggccgcatagcagaaggtgagcagctgtcaggtgagcactgctgcctaagctccacctctgtcagatgactgacagcattcgattctcataggcaagtgaaccctattgtgaactgcgcatgtgaaggatctaggctctttatgagaatctaatgcctgatgatctgaggtggaagtttcatcccaaaaccaaccccccacagtccatgaaaaaattgtcttccatgaaacaggtccctggtttacaaaaggttggggaccactggcttaaacaacagacatttattttgttgaagttctgaagtctggaagtccaagatcaaggttggtttcttctcgctgtgttgcctaggctggagtgaagtggtgtgatgttggctcacagcaacttctgcctctcgggttcaagcgattcttctgcctcagcctcccaagtagctgggactacaggcacctgccaccaggacatggccttttctctgtgcccatgcattgactgtgttctaatctcctcttcttatagggataccagtcatattggactagagcctaccttagtgacttcattttaacttaattatcactttaaagactacctccttatgaccacattctgaggtattagaggttaggatttcaacatatgaatttgaggagacacaattgaactcaccacttcattaatttatttctgtctctagttaccacttagctatctttcatacacacatattttgtcctgaaaaggagttacaatgatagaaaagatagcaataatctctcaactcctctctgtgatgggatgctttttattttaataaatattctctccctcgtgattccatcttctgtacaagagattgctgcaaaaaacttagacctggacataactcacatctgagtggagatttccattagcttcaccacatcaagttcaccagttctttggtcaacacaagttcatcttctttttaataaccaaatggacaagataaagccctattattatttatagtcagtaaggacaatgacttccttttgaatagctgaagaggtttccttttattttagaccaagaattaatttgtgtgaaaatatcggcctatagtatactcaaaacctcattctttgacataattagctacctagactcacctaaatgaagtgcaaatcctttaccttaacaaaatacaaagctattatactacattaagagctaaaaataacagcacttgataaagaatacagagactagcatagctctgtgactttaaatgataatatatgcatttaaacatcataatttttactaaaaaatgaattggaaatactaaaaagtttacatattagtatttctgtgacatgtgagggaaagggaataccaataattataaaaagctcgaagaggctttaaaaaagaattcataccttgagaagctctctgttatatatccatgcttgttattgaaaaaaagtaatctagtagaaagaatataggctctgaatgtagatttctctggttttcaatgtcctcatttgtaaattgggggttgattaatttctacctaatagggttgtcacaaagatttaacgtgtatacatacaatatctggcacatagtaggcattcattaaatgcagtctcttcctcctacattctctgttagccttatgttactaactggatgcctaagtgataccaacattttatgattttgcatttggaagaaggattctgaagactgtcttgcacaatcttctctgctccacgtgcagctcaattaatctcatattaactgcaattactcttctagcccttttacttcagcaattactaaatttgtgactgctataaactggttctcatatgtttcatgctattagtgcagaaaactattcattgactttaaatcagacggatttcaaaaggtgaaaaacacttttcaggttgagtgaactgagaaggatggaaggcaaacattaattcaccaccatgtttggatgctccaggtgtctcctatgagcacagcgatgccatttgccaatctcctggtgacatgcctgagcatcagaggttccttttccctgcctgagtgtccaccgtcttgaagttgtgctgtaacttttagcttagattgtgcctcaagatattaaatgactttcccactgaactgtgtcactagggtctcccaaaggagcatgtacttacctgacagaatcattgggaaaatgctaatgacttctttcttaaaatattattaaaattttttagctgaagttttcacataggctttttgcaaaaagaaatctgtgttacaatggatggagcaaactcagccaaaattatattttcgtgtagggagaactgttggggggatttttactagataatggctgccattttgttcattaatttttcagatagaaaagtatttctgcagtgtttattgtagaatattgttaaaatacaaaacatagcaaagaaaactataatacacaggctcaccctcagagataaccaccttccacattatccatgtgttatcttttcatctttttttccttctgtatagatcctgttaccaaaaggctctatgctatctgctttgaaaaattgctttactttttcactcactgtgttgcaaacattttcccatgttgtagaatactattcttcttcaacatatggctgcactgaattccattgtgtttattttctcaaagcttctattgttggacatttgattgcttagatttttcattattataaataatgctctaacactcagacacagcaaaataaagtggctaagaatgtgggcttttaaatatgctctatcgcttactgtttgaccaatcaaaatgccttttctaaacctttgtttcctcagctgtaaagtaatatagtggtcggacatacctcatagggtgactcgaagacactagatataaagttttagtacagggcctaattcataatcaacaaatgttacatagagttgtctctttattagatacattttcttgcataatcttatttctgtaaatggaatttctgaattaaagctcagatctttttaaaatttttgatttgtatcaacaactatgaccatatctggatagaatttgagagaatgcctgcatgttaaatgcagatcaagtgtatggacaacttgagattgttaatcatagctccgttttctcgtgcaaagagcatggacatgcacatttcttctctcttaattgataagtgatctggtgccactgaagtcatctgtgtagtacataaaaaattgaaagtgctccaaggtcctctgagacaggagaattagatttttattctgtaagcttataaattttcgttgattccaactggttatctgaggcacatgcaagtgggggggggtttctgcaaatgaacactaaattttaattttcctcttttccctcgatttagcttgggacatctgggtctggcttttcttattgtagttaagctgaatatatggtgttgagtgtttctgtagtatataacagagtctttccttcaactgaatctgaaacccttccaaagtcagaaggagaaaaaaaaactaaccctgaaagaaatcacttgtttgactgtaataatctgcagaaactggttaaagcattaaacaaaaaaataaatgaatcagatagttagaactagtatgtcaggaaaatagaacataaaatgcctctggaatctgtaggatattttctggtacaagggggtttctgagtcatggttcatttacaatgtctgtttcctcactcagggaagggtttctaatagattcaaggagactctaagctttgcaaatgtcttgctcaaataaaggcagctctgtgagggaagagatttgctctgtttatggagaaaacttgccagtcatgtttcacattgtgtacccttcagaagaacaaccatcttctttcacatgatggtcaagatggaggtttgtacaattgtgtcttctaggtctctgatcatagaggtcatgagctgtgacttttttagactaactggagatggaccgccaacttgttctggaagtcatggtagacttagagaaatgcactgccaatcagatcagaaaaactttgaaagcttccctgaagttttactaccataaaatcagttgcagggtttagctgtgccaccgaaaggatgctattttcagcttttaaaccagagcatcatggtctttgcatggtaggaatttgacgaaacctcagcagtcttgatgatgcttgtcttagttttcaaggtcagactaagaaattgagctcttgagccaggcctacaggaggtggtctcccagaacactgagtttttctttatttcaattggaataactacaggtctgttgagaagatgatgaaatgtcatgggcttaatggaaactttaagcatttgactataaattctggcagaggaagaaggctacattttttggcttgttgcatcttagactaaatctctgggaccatcggaaactgagtaaatatcatccactatgtcagggcacatctgtcttctacttatatcccagcttggttttggttctagattacatattacctctttggcaattaatgatggcttaattaataacataatgaggatttcatatcagaaaagaagtattcaaaacttcggaggcagcttaaatggggcttaggagaactgaatctttgtctttgcttggaagcttctagtgagtgtggacaaagtatgagtctcccccagacctcagcctcctcatcagaaatgggatggagttaatatttggtgatccctgcatgtttcctattaataaggcatcttattaggaaaatgctaaaaaattctcactaatttcaaagatatctaccaaggattcccatccagtgataaatctgattagttttgatcatcttttgtatagtttctttatcttcttccaaaataaggagagattttctgttcactgaggttaaatatctgcaaggaattctatacagtttccccttacaaataatcagtttcccctttcaggtgatcggaaaacttgaaattgagaaaagtatggttacaagctctatggaaacataaaactttttaacagaaaggaactttaggcaaacccctgccttccttgaaaccaagagaggttaattggcttatgcaaagtaccaatttttctgttttctttttcctgttgatacctcgatgtgtgaaatcttcctttgagaaacttctgccttttgtgaatcagtgacattgcaatgattcttagagtctagcttcttagtgagtcttgctactcaaagtatgatccatagaccagcagcattagaatctcctaggagcttattagaaatgcacaatctcagggttcacctagatctactgaatcagagcttgcattttaagaagaactcaggtaatttctatgtacattacggtttgggaagcactagtagacacatgaccccaatttagttattttttctgcttaccagagcactctttttaaaaataagggcaatttttacaatttattgtgtaccttctttgtgctgtaccatgtctcttattttcaagctccacaaaattggtagtattttattttacatataaaaaaatacagatcttcagaaagataaagtaacttgtccaaagttgcatgctggtgagccacagaagttggatttaaagggagtattttttgactatgaagtccataaaattttcactgcgttatgcatatgattcaggggatctgggtaggtgaatctctgccaaaaggccaaatttaattcttaaggcttgtgagtttttgaaaattttagtgttctatatctttaaaatgtgaataattgtctttcttgactccattaaatgacataaattcctttccattcaaaagaatgtgatctgaactgttagacaaaagcttttgggttctaggtaaacaaaaaagaaagaaagaaaagaagcaaccaaatatgaagttttgtatatgtgaaaagaaaatttactctttctctgtaatttgctgtattatatgaataacatattttgtttctggtgtaaactcagttgcattattaatagttttatgtatttgctttttggcttggactttgattagattaagcaccattaaggaatgtgaatgatcatggcattcattttatcctacagaacatatcagttttctcttcattattacactaattcccagtaagttttaacattacacacacagcaacttaggcaacaaataaaataacaaagggatgtgaataaagtctcagctagaactctgactttcaaacatataattgagagtatttattggtacaaatgagccttatactggtaactaggataacatctatctttttttaaaaaagaaaccaataaaaagagcaaaaataaaacttacaattgttatttgtttatgaaatatagatgattatatagtgaagcataaatcgtgtttctcttaagattgtccaggttctttacagaaagttaaaccctcaattctttattctatgctaattattcttcagaagcccagattttcacttggattattacagctaatctatgttagagacaagagatgtttaatcatgtccacctatttattcttcaggctctcacctcttaccttctggggaagttgctaacttagaaatacctgagaatttctgagcctgagcagtgatatcttccaatcgtaatgcagaaaagaattgtaaacatgaagaagtaagaaatcgttttgttttttttttttaaaaaaacaaacatgctataagtgattggtttgccaaccacagaaaatgagaattctcgttggttagcctaggctgtaagaacagggcagcgaagtaaggaggcaggaagaaagagatcaaaggaaagcaagaagaagacagtgttaagaagcagaagagcaaacatgagaccatgtaaaagatgcactagaaagctggcaagaattagatctactgccaatggtccactgaccaacaggcaaaggagattggcaatgggcctcatggggagaaaggaaaaatgtcatttagaacagcacagcaatctagaagtacttcttgtatggcaaacaactccacattccttaacagtgtcctgaatctgctaaattctagcatgtacaattgtgttcacaaaagtgagaagacaagaagataatacattttaaaatgatctttcatattaataataaatgatcaacatttaaaagccatcagaacctaatcgtttagccttcaaagaactagaaaccttccctttttacctggttttgacagataatagaaccctttcccttagaccatgtcctacctcttagtccgttctctgaacctcattccagtgggactggagtttgtcatgactgcagtgacttcatcggagatgtagttacaagaaaaatacagtacactgtcatcattgccaaatgtgcctactataatataatattctatggaatgttagggtcctttacaggagatgaaaacacaccctacataaaattgtgttcaatggaatattgatgaaatacactttattttagttatcttcaaggttcatttatacatacctattttatttcaaagtgcatgttcatgttcagttaaagcatcttcaataacactttagtgaccatcctatattaaaacatcatattcttaggaattatgggcttggttagtgaggttgaaaattcagttcttcatttttgagagaaattgaaagtaaaaattgagtcatgagtcaagcctattccttgaaaatgattcatagttgaaccagaggagtggggctctcttctcccttttcactacctataattgtgtccgtggaggaaactgccattccctatttctaggggccggcttcctataaggaaatatgtttgctatttgcctcattgttcagataaaaagaaaccactgctacatttcttctgtttcttcattttcaacatttccccataatttgaatttcagatccatgggttcttggtattgaaaggaatcttagagaacacccagcccaacttaccatgggaatttaaagatgtggtcatggtgggtttgctgcagggattggagccataatgcaggtcccatgcttccatgctttgcaggtcagagctctttctaggacatcactctggctatgcctgggaaaactgctgatcttgcccaacagtagttgattggtggagagatgcttgaacttgggaagtggaagacccactgtcttccacaatggttgaactaatttacactcccaccaacagtgtaaaagcattcctatttctccacctcctctctagcatctgttgtttcctggctttttaatgatcgccattctaactggcgtgagatggtatctaattatggttttgatttgcatttctctaatgaccagtgatgatgagcttttattcatatgtttgttggctgcataaatgtcttcttttgagaagtgtctgttcatatcctttgcccactttttgatggggttgttcattttcttcttgtaaatttgtttaaattccttgtagattctggatattaggcctttgtcagatggatagattgcaaaaattttctcccattctgtaggttgcttgttcactctgatgatagtttcttttgttgtgcagaagctctttagtttaattaaattccatttgtcaattttggcttttgttgccattgcttttggtgttttagtcatggagtctttgcctatgcctatgtcctgaatggtattgcctaggttttcttctatggtttttatgcttttaggtcttacatttaaatctttaatccgtcttgagttgatttgtgtataaggtgtaaggaaggtgtaagaccaatctgtgccattggtctgtatatctgttttgccactggtaccatgctgatttggttactgtagccttgtagtatagtttgaagtcaggtagtgtgatgcctccagctttgttctttttgcttaggatggtcttggctatatgggctcttatttggttacatgtgaaatttgaagtagttttttataattctgtgaagaaagtcaatggtagcctgatggggataacattgaatctataaattactttgagcagtatggccatttttatgatattgattcttcctatccatgagcacggaatatttttccatttgtttgtgtcctctcttatttccttgagccgtggtttgtagttgtccttgaagaggtctttcacatcccttgggatttgtatttctacgtattttattctctttgtagcaattatgaatgacattcactcatgatttggctctctgtttgtctattattggtgtataggaatgcttgtgatttttgcacattgattttgtatcctgagactttgctaaatttgcttatcagcttaaggagattttggacagagacaatgtgttttcctaaatatacaatcatgtcatctgcaaacagaccatttgacttcctctcttcctatttgaatatcctttgtttctttctcttgactgattgccttggccagaaattccaatactatgttgaataggagtggtgatatagtatatctttgtcttgtgccggttttcaaaaggaatgcttccaggttttgccaattcagtatgatattggctgtgggtttgtcataaatagctcttattattttgacatatgttccatcaatacctagtttattgagtgtttttatcgtgaaggggtgttgaattttatcgaaggccttttctgcatctattgagataatcatgtggtttttgtcattggttatgtttatgtgatggattacgtttattgatttgtgtatgatgatctagccttgcatcccaggggtgaagccgacttgatcatagtggataagctttttgatgtgctgctagattcggtttagtattttattgaggatattcgcattgatgttcatccgggatattggcctgaaattttgtttttttgttgtgtctctaccaggtttttgtatcaggatgatgctggcctcgtaaaatgagttagggaggagtccctctttttctattgtttggaatagttttagaaggattcgtaccagctcctttttgtacctctggtagaattcagctgtgaatctgtctggtcctgggctttttttggttggtagcctattaattagtacctcaatttcagaacttgttattgctgcattcagggatttgacttcttcctggtttagtctttagagggtgtatttgtccaggaacttatccatttcttctagattttctttttttttttttgtttagtttttttttattattatactttaagttttagggtacatgtgcacaatgtgcaggttagttacatatgtatacatgtgccatgctggtgtgctgcacacattaactcgtcatttagcattaggtatatctcctaatgctatccctccccgctcccccaaccccacaacagtccccagagtgtgatgttccccttcctgtgtccatgtgatctcattgttcgattcccacctataagtgagaatacgtggtgtttggttttttgttcttgcgatagtttgctgagaatgatgatttccaatttcatccgtgtccctacaaaggacatgaactcatcatttttatggctgcatagtattccatggtgtatatgtgccacattttcttaatccagtctatcattgttggacatttgggttggttccaagtctttgctattgtgaatagtgccgcaataaacatacgtgtgcatgtgtctttatagcagcatgatttatagtcctttgggtatatacccagtaatgggatggctgggtcaaatagtatttctagttctagatccctgaggaatcaccacactgacttccacaatggttgaactagtttacagtcccaccaacagtgtaaaagtgttcctatttctccacatccactccagcacctgttgtttcctgattttttaatgattgccattctaagtggtgtgaaatggtatctcattgtggttttgatttgcatttctctgatggccagtgatggtgagcattttttcatgtgttttttggctgcataaatgtcttcttttgagaagtgtctgttcatgtccttcgcccactttttgatggggttgtttgtttttttcttgtaaatttgtttgagttcattgtagattctggatattagccctttgtcagatgagtaggttgtgaaaattttctcccattttgtaggttgcctgttcactctgatggtagtttcttttgctgtgcagaagctctttagtttagttagatcccatttgtcaattttggcttttgttgccattgcttttggtgttttagacatgaagtccttgcccacgcctatgtcctgaatggtaatgcctaggttttcttctagggtttttatggttttaggtctaacgtttaagtctttaatccttcttgaattaatttttgtataaggtgtaaggaaggcatccagtttcagctttctacatatggccagccagttttcccagcaccatttattaaatagggaatcctttccccattgcttgtttttgtcagttttgtcaaagatcagatagttgtagatatgcggcgttatttctgagggcttctagattttctagcttacttacatagaggtgtttacagtgttctctgattgtagtttgtatttctatggggtcagtggtgctatcctctttatctttttttattgtgcctatttgatttgtctctcttttcttccttattagtctagctagaagtctattgattttgttcatccttttttaaaaaaaaacagctcctggattcattgatttttttcaagagtttttttgtgtctctatttccttcagttctgccctgatcctagttatttcttgtcttctgctagctgttgaatttgtttgctcttgcttctctagttcttttaattgtgacattagggtgtcaattttagatctttcccattttctcctgtgggcatttagtgctatacatttccctttaaattctgctttagctgtatcctaggcattctggtacattgtgtctttgttttcattggtttcagagaacttatttatttctgccttaatttcattatttacccagtagtcattcaggagcatgttgttcagtttccatttagttttgtgattttgagtgagtttcttaatcctgagttctaatttgattgcactgtggttggagagactgtttgttatgatttctgttcttttgcatttgctgaggagtgttttacttccaattatatggtcggttttagaataagtgctatgtgttgctgagaagaatgtctattactttgatctggggtggagagttctgtagatgtctattaggtccacttggtccagagctgatttcaagtcctggatatccttgttaattttctgtctcattgatctgtctaatattgatggtggggtattaaattctcccattattattgtgttggagtctaagtctctttgtaggtccctaagaacttgctttatgaatctcgttgctcctgtattgggtgcatatatatttaggatagttagctcttcttgttgcattgattcctttatgcaatgcccttctttgtctttttttatatttgttggtttaaagtctgttttaacagagactaggattgcaacccatgctttttttttctttccattggcttggtaaatattcctctgcccctttattttgagcctatgtgtgtctttgcatatgagatgggtctcctgaatacagcacactgatgggtcttgactcttgatccaatttgcctgtctgtgccttttaattggggcatttagcccgtttgcatttaaggttaatattgttatgtgtgaatttgatcctatcatgatgctagctggttagtttgtccattagttgatgcagtttcttcatagtgtcgatgatctttacattttggtttgtttttgcagtggctggtaccagttttttctttctatatttagtgcttccttcaggagcgcttgtaaggcaggcctggtggtgacaaaatccctcaacatttgcttgtctgtaaaggattttatttctacttcacttatgaagcttagtttggctggatatgaaattctgggttgaaaattcttttctttaagaatgttgaatattggcctccacttttttctggcttgtagggtttctgcagagagatccactgttagtctgatgggcttctgtttgtgtgtaacctgacctttctctctggctgcccttaacaaattttccttcatttcaaccttgatgaatctgatgactatgtgtcttggggttgctcttctgaaggagtatctttgtgttgttctctgtatttcctgaatttgaatgttagcttgtcttgctaggttgcagaagttctcctggataatatcctgaagtgtgttttccaacttggttccattctcctgtcattttcaggtatgcccatcaaacataggtttggtcttttcacatattcccatatttcttggaggctttgttcattcctttttattcttttttctctaatcttgtcttcacactttatttcactaagttgatcttcaatctctgataccctttcttccacttgattgattgggctattgatactatgtatgcttcacgaagttctcgtgctgtgtttttcagctccatcagatcacttacgttctttctaaactggttatactagttagcaattcctctaaccttttctcaaggtttttagcttccttgcattgagttagaacatgttcctttagcttggaggagtttgttattacccaccttctgaagcctacttctgtcaattcatcaaactcattctccgtccagttttgttctcttgctggtgaggagttgccatcatttggaggagaatgggcattctggtttttggaattatcagcctttttgtgctggtttttccccatcttcatggatttatctacctttcatctttgctccatctttggatggaggttttgcatggttgtcctttttgtagatgttgatgctattattttctgtatgttagttttcttctaacagtcaggctcctcgtctgcaggtctgctggagtttgctgggggttcacttcagaccctgtttgcctgggtctcaccagtggaggctgcagaacagcaaagattgctgcctgctccttcctctggaagcttcataccaggggggcacccaccatataccagccggagctgtcctttatgagttgtctgttgacccctgatgggagatatctccctctcaggaggcacgggggtctgggacccacttgaggaggcagtctgccccttagcagatcttgagtgctgtgctgggagatccactgctctcttcagagcaggcaggcaggaacatttaagtctgctgaagctgcacttacagtcgccccttcccccaggttctctgttccaggaagatggaagttttacctataagctcctgactggggctgctgcctttctttcagagatggcttgcccagagaggaggaatctagagaggcagtttgactacagtggccttgctgcactgaggtgggctgtgcccaatcgaaacctcctggtggctttgtttacactgtgagggaaaaccacctactcaagcctcagtaatggcagacatccctcccccaaccaagctggagcatcccaggtcgtctttagactgctgtgttggcagtgagaatttcaagccagtggatcttagcttgctatgctccatggagttgggatccactgagcaagaccacctggctccctggcttcagccccctttgcagggtagtgtttggttctgtctcactggagttccagatgccacttgggtacaaaaaaaaaaataaaaaaaaaaacaaaaaaaaaactcctgcagctagcagctagcttggtgtctgcccaaatggccccccaggtttgtgcttgataccgagggcacttgtggtgtaggtacctgatggaatctcctggtctgtgggttgcaaagactgtgggaaaagcatagtgtcttggccagaaatcacagtccctcatggcacggtccctcatggcttcccttggctaagggatggagttccccaaccccttgcgctttgcaggtgaggcaatgcctcaccctgcttcggctcgccctctgtgggctgcaaccactgtctaaccagtcccagtgagatgaactgggtacctcagttggaaatgcagaaatcacctgccttctgcattggtctcactgggagctgcagatcagagctgtttctattcggccatcttgcccaggaatcctcctaactatgtttttaaaaggaaatctgcttttatatattttctaaaacaatttgaataaagtgcaggggttgttaaagtcactggtgttatcttgaccatgaataaaacacaaaagtaagtgctcaatggtatacagtatttcaggagctgaaattcaacagtcactgaactgaacagtttaaacttttgaagagaaaagctgtaacccaaactgagagattgttccaatcatttgaaaagccagtggttggtttatagtcaaatgaaaattagtgatgttcttatatgtttcagttatattatattatttagatcataatattcctaatgttcttcacacctgactcaaatttttcctttttgcctttcttctgaagtcaaacattattataattaatatttttaaaggattcatactgggaagagatgagacattttggcatttaccttaattttctttggaagatgcttgttttccttgtcagctgtagggggaaaatccttctatgaaaatcaatagatcgtagctttcaggagcatttgtctggtatgattttgatggcatacgcaagaattgccaaaggagtgtcacagaagccagatgagaaacgcagggaacatcatctttctttttatggaaaacagcatggattttcaagagtaagatcattgtaataaaaataacccaaataaatttaaaaaaaacttttaattaatttatttttatctttttaatttttatttattccttttttttttttttgagacagagtctcactctgttgcccaggctagagtgcagtggcgcaatcttggctcactgcaacctccgcctcctgggttcaggtgattttcccgcctcagcctcccaagtagctgggattacaggtgcctaccaccatgcctggctaatttttgtgtctgtagtagagatggggttttgccatgttggtcaggctggtcttgaacccctgatctcaggtgatccacctgccttggcctcccaaagtgctgggattacagtcatgaaccaccgtgcccagccttatttttatttttatataaagtcttgctctttcgcacaggctggagtgcagtggcttgatcttagctcactgcaacttctgcctcccgggttcaagcgattctcctgcctcggcctcctgagtagctgggatcacaggcatgcactaccatgcctggctactttttgtatttttagtagagacaatgtctcgccatgtcggccaggctggtctggaactcctggcctcaaaagatcttcccaccttggcctcccaaagtgccgggattacaggcatgagccactgcgcccagtcagaaattctttaacataaatatttatgtaaggtgtggatggcacctggccttgcaacttttgggctctttggtgcttttgcagaagtcattgttcttatattggaaatgccatctggagtcacaatatgcaatttggattagtggagcctctcagagtgcggacgtcaggaaaccaagcatacatctcctctacagcttcttcatacagtcaggagggaaattcacagtgcagtgcctatccttgggttttaacctgcaagctgagtccatgatatactgatgttctttacagaaggatttttctatagcatgaaatatctaacagagagagtttcaagaaagtacttttataaacattcctgcttgtggttagtttgggatttggattctttagagagcaatatctttcctttcggttttatgaccttctttttcttaatgcttagaaagcaaagagttttgccaaacatttttttttctggcaatagtgtcatttggaaaatgaaaattgaaaggctcagtttctcttactaaagtcttcagatatttatatgtagtttaatagtttcatcctaagaaagtaaaggacctttccacatttgttagcatatggaatggtgatacatatatacagacacacacacaaacctatgtatatgcatatattcatatggagatagacaagattactaaattcagtagtggaaaatgggcaggagctatgcttacaattcatttctatccctgattctatctaaatagaagactaagcatttcatgtttttgtggactatgggtaagtccttttaatttttgctaaccgttggacaactctgcagataataaaataatgacaatgttttgcattgtcaattattttgtcctgaaataactagtctttgagttcattgaaaacatttagagaaatctaaataatccaagcagaatgaaaggaaaagggcggctgtgttttgataggcgtcaatgggcacgactggttgagtctagtttgtgatgagatatttattccctcctaggcacagttccacaactcacttaactttgtaaatgtggaggagaaatgtcaaatgatgtttcctatttgtctagcgcttttcttctctgataacaagtattactcatgctggatttcacaaaaaaccatggaatctcagtctccagggggaaaagttgagatattgtcataggcctctcttattgtccttccttataagaaggcatcagggtacaaaggacacaataagtgaagacaggtcttgtaagctgccaaaggccatgtcaatgaggttccaaaagaaaagtcggtctttattctatcacattgtcacatccaagaagggatagctgatggacagaacgtttgatattttaaaaactactgaacaaaaagcccagtcttttctccacaaagttctccaaaagtattaggaagcaaatgaatgcaaatataattcaagttaaggtacaattttagcatagttgctttgtcacaactgtttttctgatggccattctctgggtaatttttgtgctaagccatttttgatttcgcctgatatgttgatggcagagtggtgtgtctttatgtgcatggaaaataaacgtgaaaaatgacttattgttgctgtctgaaagctcctcagtttctgaattataaggcaaattaggcctcagatttcatttttgtagccatagtattggtgaatgataaatactagaatatctgaatttgtctatatccacacttgtcagaaaagagaaacaagtttaagcagttgtttaggaaagcccacaatattgcgttttctctgactttaggttactatcctctcagtagtgttaaaattataatgatcagcctagcttcaatggatgcatgctcttctgtctcatgaatccaaagaaaaattgttagctaattcaaatagtatttgccatggtcagtgaagaaaattgccctttgaagtgctgctaaagtcatgggagtacagttatgagggtttcaaaatgtatagctggaaagtcattcttgcaaagcgtctatttgaaaaacaaatgtatttaaaataagtgaaaaataaagtactgcatcacacaaaactactctgtttaaagcaggcagaatcttgaaatatagatggcatgagtgtaaaatgttacaaaatgtactcacctgtggtttggggctagataggttgaggataatattttaaaacaaattgctatcaaaaaccattcaaaccacgccatgaaaatgctgcagagttgctaagtgattttaagcagagaacactagtaactctcctttgggaaaatggaaaacacaagcaaaataagacaaagtaatcattttcaaattcctgaagggatgtagatttaggaattgaagcaatttctattcgattttatcaagttagagcataagataagataaactagcaacagataatttgcaatgagtgatctaaagctgaaaggaactgtgagagtcgctcttctcagctcgggccttaggttggtgagatattatttgctcaactttataaatgagttgactgtgacccagagaggttaggtgactctctcactgttgcagagctatggtaaatagggcattctaacctaggccaatttccccccttcttaagcatgtctgaaactacattactctgttgtggtctgtgagtttattatttaatatatgtggcatctccacatttcttaagcactcacagggttggaaacaccatgctagctgtgaggagactgggattgccaatatcaaatctgtgttgaataagacactttacctattctgttttttttttaattgtcacaaatctccttttaaaaagtgttattcttctgtttttaacagatgaatataaaactgaggcccagcctgcttacgttacttgcttgaggtcagtggttagcatacagccaaccaggattaaaagctagctctgtttatgtccgtagtgcctgctctttttactatttctgtagtcttcatgggaaaggagaataaataatagtactgtggttgataatttcaaagtttttagtatctgacaggagaaagttctttaaagaacacatctaaaaaaatcaagacatcaagaccgtgttttgggaatcctaatcacttcttagtgagaactcttcattcttgctctgttgttttacttaccagaagttttcctttactgcatattaattcctggtccctgtggtatgagaaattgaaggagcaggaaggcctgtctggctcagtgggactgggttgctatttagtctggctgtttcctacctcgcatgtcgattgattatcctgcctatcatgtgttgacatattttgcttgctgtactgattatacattgggagtgctaattcttttattgggttagagttcaaaggtgctcatctgtcagcaaaaagtgtctcatttcatggcatgcttggcctcctcttatatctgtcatttttatactgttctcggaagttttcctcttatttctggtcctcgttcaatagcaaagatcttgaaggattttcctttgtagtgggctattttgtacagtttttggagacagattctgttctttgaagatatgcagaatattggcatttcacagactatgactgcagcaatggaaatcacactatatcctgctctttgttaacactgttggtgcagatctctaaatcttggaattttcccaaacatgatcaatttctgaggccaataagtagatggatccaaacttggattttgcatgtcaatgtcacagtattctggataaccatcaagaagtggaattccttggagaagagtctgatgactggtgatttgattacatataacaatataaagactctcctaatgcctgaattccttgtcagtgcatctgtggaatatagataggtaaatgtttccatatggatagatagacaggtatttctttcctctcctaattttggattaaaatcctaagtagaaatatcctcagaagttattattttggattatgtgtgaggaagtattttacaattagtttgaggtgtttaagatataagtagcaagcccttcttgagaagactgccaacatgtcaagagtacattttgttgtagttttatttcgatttttactttccttacaggtcccacttagaagttgattgaaataataacaaatgttctattacagtaataataaattacaaaaaatgtttttgtgaactggtaagataatcaatgatgactggcttttctctaaattttcatgaagctttaacaagttagcctttaatgttgatataatatgtgtgtaaatcttaagttagagaattacctggagttggttgaaccaaccttatagagaggagcaaagtgaagccaagaagtgagtagccttcttttggaaaggaaagaaacatattagttattgtcaaattttaatgagtttatttgtcatttgatagtttgggtactgtaaatggtgggagcgatggaactattagaataaccttgaaataggacaggcacagtggctcacacctgtaatcccagcactttgggaggccgaggtgggtggagcatgaggtcaggagttcaagaccagcttggccaagatggtgaaaccctgtctccactaaaaatacatgagaaaaaattagctgggcgtggtggcaggtgcctgtaatcccagctacttgggagactgaggcagagaatttcttgaatccgggagaggtggaggctgcagtgaaccgagattgcatcactgcactccagcttgggtgacagagtgagactccattaaaaaaaaaaaacaaaaaaaaacagtaaccaaataaccttgaaatagaataatatgagaatattatgatattatgcttgggctcaagaagactggttttaatgaagtgagacacataaactctctgagccttagtttttaaaatctgtcaaatgggactgttacctatttatgcagtaggttttacggtgacattaaataagataatgatgtaaaatgcgtaagagagtgtcagtctggcacatagtaagttttcagtacaattcaaaactttattgctttccatgttctaattcctatccaagccagcttcataacacaaactaaaaatgatatcttcatcagccttcaatcgcttttcttgagtttatatgcagacaggactttgctgattatggtacaaagcagctatacttgtggctctttcaaggaatttacttccacaatcacatagagattgatggactcatagaatataagctggaaaggaccctgggggctctctgcattcagtaattttacagatgaggaaatagattcccagagagatgaaaagacttgttcagaatttcccagttaattagtgacagtgccaggaacaggatctggttttccaaaagcgtaatctattgttcttatttatctacccttctggtttaggaaacaaagattatggttgaatatcctgagttgttggtcaggatgaactatttcaaaatgttatggtttttaaagctacatggctaattggggaaaaaatcaaagtgtatgtatgagatatcattaatggctaaacaaaattatagtgtagaagtatgggtggtgttacctaaccatggctaggaaagtcttcccaagctaacccataatcttcaacattctccacactcctcttccaattatttgatgaagtctgttggcattttctcattcttatgcaaagtgctctgtaaacccagcttcaaccccttctccttacccttgttcaattaaattcatttccatatgctactctgatgtagaaatttgggggccactcctgagaagtacaaccaccctttttctcatatgcttgcatgtgaatagatactgagagattttaagagttcaagaggtagtacatttaggggaaggggaacagttaagtacctaagtattagaaattggatgacagtaagtattagaaagtactaaatggacatattgtttgctgcaagtacactagctgtatttctaaatatggctagtttgtggagttttatagacttgtatggtactattaactctgtctgtattgatctggaacattccaagaagccaacagcagtcacaaagccttgagagtctccccatcgcacaagctgcaaatttacatggcaaaaaaacatctcagtaagtcgaggacactgaactcaattgaaatagtactacactcttcttttttttagcttggattattacaacatataaaattccattatgcatatctgagtctggctgtgatactctttatctgttttgaacaaattctataattgtgcctttatcttatgcagttgtatctctcagagactctttgtggtttaagaaagatctaatgagagagagagagagaaggagggagggaaagagagagcaggcagtggtgaggagagacagagagagagagagagacagagaaagagactagatgatagagaaaaaacccttttgaccatattgtctagcacagcgatagaacattagcaaagctgtgactggcaagtgttcataaactgttatcttcccctgggagaagccagagtggccatttcgctgtgctataactgtaggtgtttattaaaaattcattcaaggctaaatcatatcatggaacaatgaatatggaggcctggatctgtgtgtcaaagagaggaggccatatcagggcctgattgctttatttagtggagtctgtgtcaggcagacaaggggaatgggaggtttccttggaggcttttgtgaagctctgtgcttcttctgggggctcgattagaataatcagaggccttgggaaattcacacggttttggtggtgctgcgatccatcatcatccatcatacttgtgcgctgggtgactggggagccaaataccaggccggcggggtggccagagccttctctgcgtggcgctctctggtctgcagggcaggactccaggaagcctggcagtgggaggggtggaggaggcttcagaggaactggcccatcggatcagcctgagcttggggggcttccccctccagcaatccccataggcaacagtgtgggatcactgtactatacttttaaagatttttggattgtttgctttggattttctctgctttatgtttggctgggtttgtttggagtttatttctaatttattttgagcttgttttttgtttgttggtaagccttaaaaatttttttttaactctctggattgttttgttgtttggccttctccctctgtgcatttccattgtgggaaagattggcctttgtcatttcaaattaggcaagacttgtgtggtggtgtgtgtgtgtgtgcatattttgcagagagacaaccaataaaaactccagtttatatatttcttatatccttagcaacttttttcaaactattttttttaatctaggaagaaatttggctcttagctatttaaaaaaattttaaaactcttgaattagtatagggtctagttctatagaaaagcatttatcgcaatatgatctcagagccagactgccagagagtcctctgtgagactgggttgctcaacaatgactgatttggtctctcagttcccaagcaaaaatatttggcagccaaatatgtaaatttttatctatcttccattttgggttttctcaggaaaccagggactgagttagaactaagtgcatgtacactaataaccaaacttataaatctaaattttattatgttcatcagttaagaaaatatacttaaaatttgtctttttatgtttcagagggttaatagaattactaaatttcaaaacccaaaatagaaaagaagcttattgtttgatctgtgttttaatcacttgggcttattaatatagagcccctgccatcttgtttttattttattccatattattttatttactttcaatggctatgaagtggtaaacacaagccctccctaaaagggatttatcgtcattctcttttcgatggtgcaaataagtccataaaataaataagtgtcttgcagttcattcttccttttatatttcttaaaatgaaaatccaaaacagaatgcctagaagtatattgcaatttgacaggatttgctttgtgtgcatagagaaaatacgtcttgtaaaaaaaggaagtagaagaatatatgtatgtgctctgtgacactattttattggtgtctattgcacccattacaatgagactcttgggatgttggacctaaattacaataatcataaataatgttaaaccataataaataaaacccaacttctaccctctgtctgttttcccttttctatattttttccatcaagaaaatacacaagtaaataatacaaaacattaatttggggaaggatcagatctcctttggggaagaaggcacataggctgagggacctgtgggctggggagccacccagtactgtgctctggggatttagagttctgggatgggaggataagcagggaagaacgctgtatagagaatgttgattttgcaggatttcctgcatatgcactgaatgagttttaaaaatcatcttaacaaattacttttcttgacattaagccactttttttctctcaaagttctcaacagtaggaataaataacatgtaagttgaattttgcttaataagtgcctatcaaaactgctgaggtcaggagtggttttggagcctttcctgaggaataccacttcaggcaacactgagcaaggaaaggggtgtgtacctggcaaacactttgtgaaggcagtacctgagttaggattgccaaagaatattgaacatcgtaaagtgtaggaacataagggtgatcaatataaaggcacagctactaatgtcaagcatgaagtttgttagggaatcaacattccttaagagtctgcacgatctagtgaaggtgtcctctaatgtcttacctggttttcttttttttttgagacagagtctcattctgttgcccaggctggagtgcaatggtgcaatcttggctcactgcaacctctgtctccagggttcaagcgattctcctgcctcagcttcctgagtagctgggattataggcatgcgccatcatgcccagctaatttttgtgttattttttctatttgtacatgtaagaatgaaatttttttcctaccatccccatgctgatcttctgatctccaggtttccttcaagcaagggaaaagcctgttggttctgcagcctcattactgtctagatggcccagggctctatgattgcctcccaggggctcagggctcctgattcattgttcagtattctaatcacttcgttgttcagtattccaatcttctctctatctgtgtcctcagcccccatatgtgtcccagttcctgggagtggccaactttacctatcactgataaattaactcatgacatagtatatgagctcattgaagtttattttatccccgttccactcccttattggactctctttacttcctaaatctctccctgttattcttcatcctccagcatcacagccccttttttaagctctcatgatttctgtcatggactactgaaacagcctctgactggtccatctgctttctgccaattttaaatttctcctcttttttgaatcagagtgatcatgctaatatccagttctgatctttccattttccatattgacaataggaggaaggccaagctctagggtatggcatgaatcctttgattgtttggatcctcactgcctctttctctgcatgtgcacctactctatttctcactataagtcagacaatactgaggaatgcttagtctcatgcacatgctaagctctttcatacttttcatacctttagatatgtcctctcttctttctagtagggtctttttttccctcatcttttctctgggaaacaccttcaaagccacctttcttcttcagcttattcttcccttcttgggtgtggccacttcttgacagccttccctagccatttctaccctaagacagaattaattccctctctccactgaaccttggacatagttcgttgatcgtgggtactatgttttgtttgcatgtcttccttctctactgaaatgttgctctgtgaagccaagaatgaggccaggtattttggtttccaaagtccacattcagtgtctgtgtagtccatagtaggtttttaaatgtaaatggaaatgaataaacgattaatggtcagaactcttggagatgattttaccttagcccagagaaacaatgctaagtgggtcaggggtgggggtgggagaatttcaggtatgacagcaggttgatcagggctgtatgttttttgagtaggggaacctagcttaaggcaggcccttgtctactgcatccatggaagctaaggggagggattacgtgagcatcacgtgctgtctggggtttggcagagtggagacatcaacgctgatggtgcccagatcccggcacttaacagcagaccccataggttattaaagctgagagcctatctaggaagattagctgcaggaagtgctttaaccacggagcaaacaggcagtcgcttgattagtgcctcagacagggtatggcactgtggtgttgggtttccatctgaaccattactgggatatttgagatctggagcttcagttctagcctgaccttgcatttgatttctgaatccatacatcagcaatgagccttgtttgcttctcttagattgcatttccaagcagtgagttttgtgtcccctgtttctggatatctgaaaaggatgctgagaattaacccatatggtgtttgtttaggtgggaaatcctaaatagcttctggtactaggagaacacagtagcaaatatatctttacggtaatgtgttttaaatcaaaagggctccatattttcccctgtgtttgaatgtgacattcttgatcattccagacccacctgtctgagaatgcaggaatcaaaaacaggagtcactctcgaatttcacctctatttaatccatcacagaaacatactggcttttcactgtatatatatagaaaaccacaccaggacatttaaacaaagtgacacagatcatcagcagatcaactgggaatgacggctcaatcaaacaaatgtatgttgagaatttccaaagggcagctctcacagcagccaagccaaatttgtttagtatacatgagttagctgcttagaaacattcactctgttgcatgccagatgatgacttttctaggtaaacatccatttagcagcatatatccatccatgaaagtgttggcatgattttgatctattcttttggactcctgaaattatgatttcattccactcgtagccaagtaccaaacccacacatgaaccatttaggttaaaaaaaggaggtgggagctatacacttatttcaaaatgtaatataatcatttgaaaggtaggagaaactccataaaattgacaggccatttcacttttctgacaagtaataaagtaagcatcattaaaatgaacgtcaaatttcagggtaaggaagcagcagggaaaatacctaccttgttcttggtatttggaatagaatgttgagtatttatcctacctcagtctaaacttggagacattccttttttgggtaaggggttgggagtttatttataattggaatttcataatcagatcccaagtaagaaaatttagattcttcagaaaagggcatttatttgtcttattaattcttctatttgaacaatttacttttctcttttaataggtgtcacttaaaggaagaaaaactgtattgagcacaatcttcaagtccaaaacaaaaaagcaaaatgtttctttaaaaaactccacaaaaacataaaacaaaactttctggcagaattttcaaactctaggctcattctcaccatctactttgaaatctagcttgtgttgtacaaggtttagctcagtactctggtttatttatcaaaagcttctctttctgattctttttcaactacaaaattctcacttctggggcacatttgcaagcagcaagcttgagaattctgtttttggaccaaggggtaattatctaaaaagtattggaagagatcattgttttccaactttaacttcttctagaagaaaagttgacacgtcacttacttgggcaagcattctgaatggtcagtagtctacaattctagaaaatacctcttcccgtggtggcaatgacttttgtaaatgagagcttcctttgaaatctgtcagattcagagctaagtgaggtacaaagtacagctttcaaaaacgaaactcctcataattaacatttttgtattacactttcagttctagggtacatgtgcgtaaaagttggttcaatttgaatttgagcatctagtgtatttacagccactgagggaagatataaaggtaaatgaaacacagcccttgccctaaagtcactggaaatcaaaacgaggagatggacataaataaaactcactctaatagcaacaggcaattgacaaaaggatatgttttgaggtacgttttatgtactttgtgatccataaagcaaggaactcactctggagcttgaggagatgatgaacatggagagtgggaacccttaacagatgagatgacacctaaatgggatctgaaagggtttcaatgtgtaaatcctcaatgctgcctctttagcaaggccttccatacctgaagtagccacccgcacatacatttcaccctgctttttctgctgagcacctaagactttctgatgttctctatgtgtgtgttggtttagtttcctcctctacccatcaagcagtaaggttcacaggagcaggagtattgttggtcttgctcactgctctctctacagctctcagaacagtaggaggccctcaccaggagcagagaatggagaagatcagaaggctgacaaagaaaacaacacagggaagccgcattccagaggatatatatggacacaaaatagatgggcacattgactgtgaccagtcacaaaagaactttgtgaggtcctcaaaaagatgtggctgatttttgtgaagaaggttgaagaactctaaccctcctacatttttctaaaatgaatgtcaatcttgatgacccaggataaagtattattgggagataaatttagtactcatccatgaacaagtgtatgatatgttcttcaatccctttatccaggtttttaaaatgggatgtagaacatttttctatttatattattatttatgtgcccccaaatgtgtataaatgagtggcaatctttaaatccatagagagagcactaatgttcgtgcatatagaaatgtagtgacttgagtttgcagcagaataatcttggaccaagtgaggatttgttgcaaacaaaagattttgtttaaatataaataaataacaaaaacaatagcctgccatgtttccacatgtatttaactacttctacaatgtaaatttcacacagtcccaagaatatcatttatcaaagctcatcccaggtattgggatgaaccagaagctttcaaagtgttgattgatcactctttgctagcagttcactaggattacacagccactccaaaatcaacagcccagaagaaaatgatacaaggcttggaacaaaggctggaatgttaggttagcaactgccttacattgcagtaatacatcaattaatattcataaaatgtctagaggcatgacctggtaaaagctcagaatgagctgcccatgacaattcaacctttttacccacagaggaatcctttctactcctcactttcatataatagaactttgggagaatgctgggtggggtttgcctatctctgaacctaactgaatttaaaactcttgagaatgttatcaaggtcgtgtcatgtatacacactctgggaatatctgtctcatgttcattcgtcagctaaggtttttggaggttcaccaactgcaccatagcaatggaagagcatcaagaaagttcttcatgttcttttctttgccaggtgtttcaaagcacacattgtttttgaagtgatggaatgggatatttgtgggaggaattgaactgccttatccaagatatagggaaagagataggttaatcttatgacttccctcatatcctgcactttgggctgaaataatggaataggttttcatcgtctatcattaaatattgctcattgttcattggccaataatgcctcttacaaatgtaaaccttcctccaacgttgtttagcccaagctgtttcctgcatcgtcacagaaactatggcaggggagtgttgcggaattagctcatctttttgtaccatgtcaatgactatgttgatcttgttctacatttggtttcaacaagtgtttattgagagatttattaataggggagtggtggagaatgaattgatcatgaaccatttcataatcttttgctagctgagtgcaggtagacctgaaagacaatgacattttagatctgtcacttaataacttttggcatttgtatattactctaaagcttacaaaagatgctcaagagcatcatttattctgattcttatttatttatttttttttgagatgaagtctcactctgtcacccaggctggagtgcagtgccttgatctctgctcactgcaacatgcgcctcctgggttcatgcaattctcctacctcagcctcctgagtagctgagattacaggcatgcaccaccacacccagctagtttttgtattttttttagtagtgacagtcttcaccaggtttgtcacactggtctcgaactccagacctcaagtgatccacccacctgggcctcccaaagtgctgggattacaggcgtgagccaccatgccttgctattctaattcttaatataacttggtgtcatattttgaaaaccagtgttgtcttatggaaatacaaatgtgagccacatagtaattttaaattttctagtagtcacattaaagcaggtaaaacaaaacaggtaaaattaattttactaatatgttttatttaacatagtgtatccaaaattatattatttcagcatgtaatcaatagacaaaaattatcaacaggatattttacttgttgtatcaagtgtttgaaatctgatttatatttttaaaaattacagcacatcccaattggaaatagccacaagtcatgtgctctattgtcatatgtgactcctgggtaccatatatgacagcatcaaatatgaataaagaaactgaggctcaaatacattaagagaattttctggggttatataactagtttggtggacttgaacccattgtgttcttctggtttaaacaggaattggcttggatctatggtttatagattatttgaatttcttgtgatattgtaaattcatactatagaacaggaagctgcagatgttatgaaaaatgattctatcaggtcagtaagaattctttatcactaattctagaaatgccatataattagtactttttaaaataagcttcatatggaattcagaggcacagcctggtttggggatagcttctatagtttctggactccttaaggctcatttctgtattcttccatttttatatttatttatttaacaaattttatatttatttgtttattgaacctttgctatgtaccagacactatgcttggtgctgcaaaggcaccagtgaagaaaacacacagggtccctatcctcatgaagcttatgttttacaatctataaggtatggctagttcatggcaggtgctgctgcaaatgttggtggaaacaaatttagttggtaatatttgacactggtttactgttcttcttcctgaagaacttagtaaaagtcttgagaaaaggacataaatatggattatccatgtagagactttttgtttgttttttattccttttttcttttaaaagaaaaacaaatttgtttgaaaaggttgcaatgtgaagaggacatgatataaactctgaattgactgtgtttggttgttaatctatcagtatcttgagcatttggagtgtgtgtttatgtgtgcacatatgagtgtgtgtaaatttagtagtcactttccctttcttcagtggggcatttttaccgtacctttaagcagactaaggacacaatttgtgtaatgccttttgaacatttatgttagaacttcccaatttagagaaggagaaaaaggtaccagccaatttcagtaaaattggtgtgctttggctgatgttttcaactcaacacaatcacattgaatcattgtaatgaactagaaacattgctggatcctggggattcggcagtgaaacaggcacccatgctccctgccctcatccccttatagtctagtggagtttcagtggaggtgtgctttaatcatctttcatacttgggctctcttgaatttggagtgtgcatgatctttttgtgactcaccaaatatttatgcaactttgttgcagttgtttatttgctcatttgttttgtatatatatttgacctgatgtatataatgctgtttcttggaagaatttataatacacttcttttccatctagaaaaaagcaaattggctcagctggtttttcatcagccaagcattttcatttgaccctttaagctatctaaactttgaagaaaaatgcagatatgccctactctttgaaatggtgtcgagatccaggagggttaatttaaaaattcataaatcctttgtactatgcaaattaatgacctgtaaccttttttccaggtgacttgttttgacttaactatgtccaaataaatatgtttatttagaagagttcaatgctaccaaaacctgacatgttaagcatctcctatggctcataatatgtaccagagatgtggaccaccctctgttttctcattatgtcaaataatagaaagtggaaatcactctaatcctttcttctgtgtctgccgtacctctgcaaatatgataaactcaatccaatttaaagtcattacctctccaaggcttggccacagtctatacccctttgtttcacaatcctcttgattatctgccttcatcacaactagaatttctagccagcattcacttcagctttctcttaaaaaaatggaatatcacttttagagttgatcattgaggtcattttctgtgccattcacttgactctatttaatgcagccttatattacataagttaaatcctcctgggcatttgccttatctccccaacaagattgtaagtcctttgaaatcagcaatttcactttattcttttttgtgaccccctcatggtgatttacatgtagaagtcttgttggctaaatgattaatgttttgtggcatatgttggatcatagttgttaagatttaatagtggtgatgagtattaaaaacttgaatgaagtagacgtattaatacaacaacagcaacaaaacaacaaagcaacaatagcaaaagcctgttaaattattgtgtattctatagacttcaggtatctttcctgtctccagtagattttcttaacattatgtgcttttgatagaattataacagttataattttttctcatgagcagtcatggttcgtatagatttacatggctttatccacaatatatttaagttagtaagaattttaggtgtttagatgaataaattgaaaattttcttgctttctttagctctgagattctacaatgctattgaaatatctatttcaattgattatcctgaggtttaagcaatatgatgccagaagattttatgtaacttaattagcatagctatagtctgttagaacaagcagttaaagaaggtttaccagaataaactcataaaaaaatcagcaaaacaccaaaaaaatcactgagatattgtttattctagtgaataacacctggatctaagtaagagttgttttatatcatgttgatataagtggacagcaaaatattttatgattatattactaaatatgaagctccaaatatgtgagttttgggtattcttttttacaaagcaccttgatgaatgaaaagctccttttttgagatcttttttcccccatcaaataaatacagctctcaaaatgaattttgctactttggctttttgttaagttactttgattattgtatacataggtagaaattatttgagaaaaattcattatctggtgggtagtgtaagacaccagaagacaatagtactgacacttctctaagaactcctactccagattggtgccatgccactggaggttccagggtgctctggccagtcctcgtttgaatacatcactgttctgagatccatcaggactatctctggtcagtttggaataactttcaattctagctggaaggtaaatattgtggtttggatcatttgtaggctggtgggagtttcactggtatcacagcagtcctacctattcacaatagaacttctgggcccttttcagtgaagcagatcaagcagaaatacatatttagttgacatgggaactacccactactctgtgctgttttctgttggcttactttgtaatggaaatgtgggcgtgccattttagaacatgtggcaatgtttcatcattttatgagttatttggaagcatcagtgagggtagataatccccccaaaatattctgatgctcacgttactatgaagagcttagtgatactcagaaataaatgtgaatggcaactgcgtttccaccaataatcaaaataagaggtttctttaaagatgtagtacatatatagttctagcaaacttaaggatagaggttctacgagactggcatgcccaattgcagaattacttatactcaactcttttagcactcagcacttttcctaacctcatcttaggccttattttatttcattgtcacatacgttaccatctatgtcttcactactgaactttaagctacttgagggcagacattttatcttattcaactctatttctatccttagcaacttacacagctccaggcacaacgtggtatttattgaataaatgttttggaatgggtaaatgaattcaagtctgagcagtagcatctttggcaaagattatcacctcaacacttcaatcatcgaattcctcttttaatgctagaaaaggatttaaatctgtgcacttttctagtctatccacaaaatttcaattggaatgtgcaattgaagcattcacacaaaactagtgaagtctgggacatctgtttaatccttcacttttcatagtatggagcctaccaaagattttgaaagtcaaatgtatatttattccacggaggaaactttatcaaccagtgcaaaagtttactggcactagctggtgatataatgggtagcttaaatcctgctaactgcaaataatttttcaacagtgtttatgattgtggtagagtttagtgaggcagaagtacagataacataaatatttcaacaaaagccgattgtactgcagccataaataaattagactcagtttgtaaataaatttagtttttgccagcaaacatttataattctctcttgctgcaaacgatagtaatttatatagaagaggccctgaatgcatttttttttgaaagtcagttcccattagaaggcagtgcctggtgcccatcaagtgtcttagactgtgtgactcaattagacatgaaggatactgtacagaccacctaatgctactagttattgtacatgttgataatgacaatttccagagaccatacatagtttggtagtctatgaagttgtcatattatatcattcccttaaatacctagcttgtgttaccacttagcaatgttgaaattaccccctctcaaattataagtgctatttggtgtatgtatacacatatgcatagcacatctgttcatatttttctgcaaacatttttaatcaaaatatataatgttttctcatacttaaaaaaagcaaaaaatcttcctttatgtttttcaatgacattctcttcatctctgtggttttgaatgattttacatttaatatgatgtggtattgggaaactcaatatgggggcctttagagcttagaatgggggcagaaaattgcactccttagcaacatctaaacttgtttaacactgaagatactgtgcttgcaatggggtagagttcaagctaaaattagctaaatcaaggactcttttccacagaatctctttaagatgagaaattattgctgtcttttagttaccaaaccttgtgagaacaaggaccattgctcattttcaaataaaacattttgagactctaacaaaatttcaatcttttgggcactctctgcttcttatcaaaccaagagtgtggttaagttagtgttctattgctcgctcatattccgttttaccagcaagccattgctacaactccctcttctgccagacatgcataattattttcttttctttatgtaagactcctggctgtaagaaagctcttctgttttgtggtaatagggaagggtctgcatcaagtcagctgtgaaaatgaatttgaacttacatttacgctgtttatccagttctcctgcatgcctatctttgtttgccatgtggtagaaggtagatctcaatctcatttactttttgatcttcatcttttgggggttgttttgaatattttcacccagaatatattagaattatagcctccttgctacagaatgcacaccatcctccttcctttagcgtgtagctcctgagttttggtctctcctttggaggcaagaaggatctctgccaaaagccaccaagccacacttaggtaattataataaacaagttggggctctcatttcacatgcagagctgaatgaagcagagctgtggtcacagggatcccagttgctcctccattagcaatggcacattaatgctccctcatgtctctgcccacctttaaacactttttttttaaaggaagtaaatccggtcactctttagcatgtgaaggggtgcagctttcttctgaaaccaccatcaacaacataaacaaattagaggtagtaaaccacaccttctgcccacacataaaccacagtcctcaccagagggcagtctacttaatgtgagaataacagcccagttttataagcctctactgggaataaattccagtttcactggttagagcaaggttaggcagctagagcacagtctctcctaggttacatgttgggagagaccaaaccaattctcagagtgtctttccaggaaatacattttataagcttttggcacaccaaattttgaccaccttctggtttctactatgtagaactgggattgcttgagtggaatggacctggggatgaacttgtccaacatgcttattttatggatagggaaacagagaccccaagcagctatgactctcagcctctgcctctcaaggttactccagggttcagcaacatattgacgcaagcacaactccatgccaggacttgtgaccctcctgctttctccaaatgcaaatggcatagtttacaatcctccatcttgacccatatgggagttgtaaaatattctctataccttcctgatgctgatatacttcctttcttgacaatggttagtcctcaactaatgtgtccagccctaaactaatgtgttccgtcatcagtaaattcctgactgtgatagtcttttcttaaatacctgtttaaacagtaatttagataagaatgtcccatttgtgtgcaacaggaaatgcctgccttcttttagatatgctggcaaataattactgtagatatggctggaatactgaaaggctgtactctggtcatttcagattgcctgaggagtaaccacccagtctgctgcagcatgaattcaggacggttctactttcctctaaatgaatctgaaggaaaatcactttggggacatagaaagcttatgaagaaaaagcccatcaggtccatcagaggttgctaaaagtctctcaaaaatttgtactggcaaaagaaagtagaggcacatagctaaaacataaaagaaaaactatctatctgatatgtgataagtctgttcttacctggtcattccagtggatattggtgacggtggctccttaacaacagaataagccaaacattaaccagctcatgttttcctttggaatagtactcacagaactttaatgtctttgcgttagctcttttagattcagtaactagataccaaatggctttactggtacctcaagtatgaattttctagcaatttctttccattaccttttgacaaaagcttagttccatctctgaagagaaagttttggaagaggcgaagcccattttttaatagcttaggagtactagtttaattcccaaatcatatttatttagtgaaatgtctgtgaaattcctagaggagtggaaaatctcttaaccagatttaaaagccacaggacatgcaacagtatgccgcaataccaggagaaaaataaaagtttgctcattgatttagtcccttattttccatccgtatcacattctttgccatctcccttgctatcttgcccccaatacttccattctgagtctttttgacaactcgtatatgaaatatttttaggaaacactggggaaaagttccataaggaagacatggaatagcatggtactatgaagtagcaaatactaaaagtgcaaggaagcttagagggtcattaaaaaaattctagtgccaagccatgttgatagattatttccaaacataatggtcgtatctagagacacgggttctacagattcagtccagtgtccaaacactccatttaagtctcttttcttctcactcccctctggagcaggacatgctaaagactatgcccatcagcagttcccattctattcaatgtctctgttttctaagcctgtaattctgcacccttgctacagtccttcacagcttgtttaagtcagttttctggaaattcattttccctacttttactagtttcctttcttcgtttctttgggatcttaaatttcattatcttggggccattctcatagaagattttgctggccagttcatagcctccttctttgttctgtttgtgcatctggcattagttgagctccacccttttccccaagcccagcacgtgtttattcactgtgttactggtgcagaagagctggctcccgaagtcctctgctttctcacaaacaagcctctgtaactgctctggaattgtcctaacaagggaagaagagcatgtccagttttaattttgtaaggaaattgatgtcttccccctcccttccctgccgcactgttagcaggcatcagctcatggacttgtgctcatgtgctcacgtcctaccaggaggtccctagtggggctttgaggtttggccgagctgttctcctcctagagcagggcacacatcctccgctctcagccacgtgtaatccttcctgtctgcttgcaagttgggcacaaagtactggcgcttgggcccaccctcttctttagtagcaattaacctttactacagagcttcctttgaagtttgctcatgtttttattacaaaactgcaatgaggaacataatggggggaaatgtctaaatttctgagttacctaatctgttcaattccctagttgagctcctcttggcagttgtttcatgtagttatgatctcaaccagtctgcctgggatctcaaatcatgtttctgtctcagcctatttttaagattagggagctattacacacacacacccctacacacagattgcaaatacacatggatgtgtgtattatatgcatatatgtgtacagttgagtataaataattaacttcttaataactacagaaatcagtcttactttatagtcaaagtatgtatatatgctcttaatattaaactttttagttgctgaatattttctatcaatgaactaatgtgaagagtagagagaaaaattattcatgttactatcactaatgataatgctgagtgataagtattatgatgggcattaatggtgaaactcaggattttgaatggcatctgaccagatttgcagttaaactaggcggaaaggccaaaagaaacaaatggtgagttatataaaacccacaaaaagagaaggcatttaggccagccttgcaaataagaaccgaagaattacgagtgaaatggcatttttttctagcctgccgttcacaggcgctcaaataaatgaaatcatttttttttctgcttttcactcagcagtaaatcactcattggtaatccaaggttggtagaaaagcaactatgaaactcaaagaaaattcaagggaatctttttttcccttctgtaggtaaggactttgtaagaaaaatgtaaaaatcacaaaagacatatagacttagttccataaaagttaaaaaaaatcgaaataccaaatggcaaattgtctactaggaaattttaaaatacaatatccaagggctaatttatttatcattaataagacagacatgaaagcctaattaaaagtgggcaaaaacaatgaacaatttgcaaataaagaagtttgaatgacaaataagaatatttagtttctgtaatcaactgagatgtgaattaagcagtaatagatatataattttctttattaaaaacaagacataataataaatgccagtataattggtagaagtgtaaattgctatacactttctgaaaagcaatctgtcaatacccactaagttttcttataggaatctaacctaaggaaattgaaatggatgacaataaaaatttatgttaaggaaggctcattttcatgatatttatgatatcagaaaattagaagcaacataaataaaatccatggaagtagttcagctgttgtggattcctataatggaatattataaagcaattaaatgtagttttagaaaatagtaaaatacacataaggaagggtttataataaactataatccaatgaaaaagtcaaaagccaaagtattcacacattatggctacgattttgataaaacaaacaaactttaaaacatatctttaaggatcgaaaaacaagttgcctaagagttaaagggaggactgggtttggacacccagctagtctcagctgactttggatatattgaatatcaggtcctacatctggaaaatggaagattattcttatcatcattttctcaatggattgttttgagcattaaaatgagaaaatgtggatacatctatggaagttactattattggtattatttctgcaatttcttctctttgaaggttctgatatgtttccaaaatggaatacttctgaagtggaaacctatggtagttattcaaagacacatataaataaatataatctaatcaaaatgtggcctttcccttggtctctgaggaaattagaacacttaaaatttgaattgaagaggttgacttccaagagcaatttcccaaatcatttgtctcaaatccaacaatatgcttgtctttctttcctcactcagttaatgacatgcctaaaggatgcatgaagcaaattacagtagcagacagctcagctccaagaagttacaagtgttatttatctttatgggaccactgatatatatggcacttcttacctgatacttacctattgtaaacgtgcccaatctgtcagtgtgatatctgagaaatgctttaattaactatagttatagctgagggaaaggatctaccaattttccccaataacagagatttaatggggatatgataattgaagtaatttatcatttagatgaaatgttttagcagctttttggatagtttttgagtaatgtatatggaggcattattttattttggtttatgcaaatattcaatgtggtgtgataaactgcatttgctgttgaaaatttcataatgctagattacattgaaatattgttgcatgttttgatacgtaaaactcagcagtttaatattttcgcttttgtcatcacagccttttttacatttaatttggatgatactagattaaaagtggcttcaaaacaaattgcctgcacttgcatatatatttagtgcttgcatatggatgaataggtccgtgagttcttcttgtggatttgcttgacctatgtaagttgttctttaggtttaattgtacatttttgtcattgtaagcagaattgcattcaggctttaaattcaaattcttctgtgcagctgcctgggcacacacatgtattttgtctccacaggaactgaaatctaaatgcactcgcttagattatgcattgggagagtttgtgggtaattcagaggtcatgggataagctatgccagtgggagggcacagatgggcttgtctctatgcttttttttttttttttttttgagacagggtcttactctgttgcccaggctggagtgcaatagtgtgatctcggctcactgcaacctctgtctcccgggctcaagcaattcttgtgcctcagcctccagaatggctgggactacaggcatgcaccactatgcccggctaattttttgtatttttagtagagatggggtttcgtcatgttgcccaggctggtctcgaacgcttgagctcaggcaatccacctgcctcagcctcccaaagtgctagggttacaggctggagccaccacacccggcctctatccttttttaaagatcactttcatgaaactgaaagtatgactgatttgacactttgaggaagtaggggaaattttactgatctttaatagataattacgggaggaatattgttctatttattttggtgccttttggtttcctcccgcttacatggacacatttatagagtacacaatgttttacaatttatatttctcaagaaaaacagaattctaacaatgggggagaaatcgctttaagaatgtgtaaaataactttgcatttgcagtagttgaatgttacagttctaaagagatgtttttataggtttttacctgtgctaagaccattaatgagcttttaaatgttaggttgaattgcaaaatctccctgaacgataaaattagatggattttgttgagtatgtttggaccttaaagtatacttctctgataatatttctttggagaattattaaaattgtttcctttgatgttgggtttggagaaaagtggacaattcatcatgttctatttctacaggtttaaaggtgctttgtaggatcaaaagtttcctatatttggtaaaaaaaagtattgatttggattcatagtttaataaaattatatgttagattaattatatatttaacaagtgtttgttaaacacctatatgcagatcacttggacaattctgaaaaagtaagagtcctagcgtctcccatcagggacctatttcctacttgggaatgaaacaatcatacacattaaaccataagcagcaatgcatggtatatgattgccaaactgagggataaaattgtgtaataattcaaggaagagaatactagtgttaaatgggacggtgataggaccagctggaatttgactcaggaggaagactagaagtttgtcgggcagaggtgcagagagaggagtgccaggcaggaagaactgaagaagaaatactcactgagctcagaggagagtagtaagtttactctaacttgggggttccctttgaggagcattgagaatcagatggaaaggaagaatggtttcaaaaccacagagattttagtccaaacctaagaggtttatactttacctgcagacactggagattattgaaggctgtcaaacaggaaaattggtctgccaggaaggtaaactcagcagtgttaaacaggctcagtgttgatggatagtggaaagaagctggaggttgagacccatttaaaggactatgaaaatatttaggtgtgaaaatgtggatttgaaagaattggatgaaggttagaatcttgcaagaagaacaaatagcatttagtgactgaacagtttggaagacaaaggagagaaaatggctatgttattttaaagcctcagacatggataattaagggagagatggtattcatagtagaaagaggaaagtgaacaagagaatcaatttgagggcagatgataaggtacaatattttggacatgctgaacttgaatgataatgagcttgtatgttgagaacctatgtcccataggtataaggttgggttctggaattcagttatatgcttggtttaaatggcattatctcagtgtttgaaccaagaaccaagcacctcattaaacaatacttttgcatgtgctatcactttacacttcacaaaactttaagagacaggagtcattacttgatgggcaattgatgatgagtgttatagtctgttacaataataaatctgaataatgaaggtcttctatcttctagcccaataaactctcttagaagactttaattgatagaactgcggggttggtagggtcttaaagtcacctagtttaatcagcaacttgatgcacgagttagggatgatgcatcatccttaactcgtggttatccaggctatagtagaacactgatcatggagctggaggcaacccattttaccttctttttttattttttttatttttttttttttttgagatgggctttcagtctcttgccaggctggtgtgcagcagtgacacaatcatagctcattgtagccttctcaagttcaagcaatcctcccacctcagcctctcaagtggctgggactacaggcgcataccaccacactcagctaatttttcaaataattaacctttgactagctcgatcgaagtctgtttcttcgtaattttcatctgtttttcttagttccttccttgaagttctatgaatcaaacaaatcaggtatgactttcaatttgtgatcctagcagacaagaaatgtattcatttgctctaagacaactgaaatcccctttgattggtttcataaaatccccatacaagtttcatagaggtcttaaggtctcccacggtccactcgtttacttcaagtgtggcgccgtgctgccttgggggtcctcaggtcctccgtgctcagtgtcgtaactcctagctatccaaccctgctgtctgttcaaaggtcttgccacctccccaggtgctgctccgtaaagatgagcagtgccccatacaaagcgtttctgatctccctcatttctctgtctggaggaaattctctgtctttttggtgcatctcaagggacccttcctctccctttccccgctggaaaatttacccaatttctttaacgattttagcgtttacgaatacccagaggcatcactggcttcaggtaactttaactttcttctctgcataagttactgaggcaaggaaataccaagggcttggtgacatgttcaaaattggaaaggaaatatagagaaagaaaaaacactaatattccaataaataatcctgccacacacatttaagccttgtggcacatggcagcctttggaatctttgatgactctcctatgtttattccaagataacattgcatgacaaaactttctaatatattttagaatcctgtcagctcccaatttggaattgtttgggggttgtagttacacacatgtttaacttcttgtctgtactttagtcagaccaataatgaagttgctgattgtttcccagatggataatgaattgaactagcccatgcaagtattgacaattgaggattagctcatttgatttatggattcaccacagataaaccacagaggccataatctctagcctctccctggcctgtaaataataaagattttaatgaaggcacatcgtaacaatggtctttcctgtttatccttcaaagaacaacataataaggtggctacccctgtggaattttgtctcttcaatatcagaaggaattcatgaagttcttatttattcacagataatgagtgtgtatatggcaactaccctgaaatacctttggaagaaatgccagatgcagatggagtagccagcactccctccctcaatattcaagagccatgctctcctgccacatccagtgaagcattcactccaaaggagggttctccttacaaagcccccatctacatccctgatgatatccccattcctgctgagtttgaacttcgagagtcaaatatgcctggggcaggactaggaatatggaccaaaaggaagatcgaagtaggtgaaaagtttgggccttatgtgggagagcagaggtcaaacctgaaagaccccagttatggatgggaggtaagaatgtattttgagttaacacatttatatattgcagctgtgtaaagaagagattgtttaagcatccacaaaataagcaaattatatttgttacaatatgttttcaacaggtttttaagaataaacttcctttacaatctcacttcttaatacaaacaatgtattgattaaaggtatagcgtgataggagggaacccaacctaatatatggttaaagaattgtactgatttgaaaaaatactaaaggaagaagatatgattttatagttaacgtttggaaacattggctatgaccatgtgtagcatgtggcattagcaaacaagcataatcatatgacatgtttattgcattttatcttttttggggtggggagttggaggattggaggaaaacatttgttttctctattttgtgactatgagttaatttggttttattttcattttgtgctatgtttttctaatatattttgcctctcttttgataaccctgctttaattatacatgcttccagaatgtcagcactgtactcatcactgaattaggttatggttctttatattcaaatgatttaatgagtaatttgtgcatcaaaacagacgcacaaaatggttgtgaaaattagtcactcgtttcagtcatatttttcataaaatccatttggcaacatctaagaattagaagttatagtctgattaaagaatctaaattaaatttatttcaataaagacaggtaactatgttattcttctgagtgtaagttttatacagattcagtagatatatatactttccatttatttctgtaacttgaaaacttttgtgcttgaatcattacatcataatttctggaaaatcttgtttctatctgaaaaacttgtagacagtttctgcaggggtaagatattttttagagatgtgattgacctttggtttcatagcatttcagtagacagaaatcagataaactggatttatttcggtatgtttccttaatatttatgatcattaatagaatatctggttagcttttaaatagaaatgaatattcagtgccttcaggacttaatttcaactttttgtcctcttgctttatatgtatcctcttgtgaaatctgttcaaaatgccataataaaagcaattcttgttcaaattctgaaatgccagaatccggctttgacatgattcaagtgggaaatccttccttagtttcattcttaaccatagccccagtaaagctgaggtttagctgcattgcctttagacacgtgtactgataagagagtttttaaaaatcactgtagcattaactgatatgtgagttgaatacgttttaaaccaaatgcgtacgaactttacgtcattattgttcaccttaaaataatggctataaacattctaataataagtaactcattaaacttttattacaaaatctccacagttaagcaacaagtgcaatactcatcaagattatccagaaggcttggaataaaccacagcttaataatgaaatcacttttcaattacaggcttggtaaatgcaggactgtgccgttttaaacataatacctatggattggtggatgaacctggggaaaattctgcatttggaggaaattcaaaaataattatttttttctccttggagtgaaatgtcttccacatatacactggcaaatatttaccttgagaaatgtaaaatgatttttttcattatgtcaaaactgagttgtttttattgcttggaattcaagacacctttataaaatagttcctgactttttggccgaaaatcacatattccctttctcctctttctccttcaagaattcagttgatggccaattcagtagcttttcccatcattttaacgattacccttccttttgagaatgtggcttgtctgctctttaggtattataaaaaaaccaaagaaatgactttttgtaattttggcaaacttgttttccacagaggagcagttgagctcttgattcttcttagggttttttttttttctcttttaatcttacctagttaatacaaaacccaatcatgattagcaagggcactttctcaaaggcatctcacccaacccctgccggatgacttttatttgtccccatgtcatctttttctcaactctagctggttttcctcctatttagttagagataattgtgattaactagtgtgacctctctttttgatatgccttcatttttgaaaaaaatgatgaaggagaaaaaaaaacctcttaggcctcctcccaaataaatacagagaaaatccatgttcagcaaacaattattgagggactactatgcatcagattctgcattaaatgttcccctaatggaaactcagcctatcataactgaacaaatcattgctgtctctagtagggcccttgctcttttcttcctgcaaagctccccttcttatacatttcctgttttaataaattccattgccatctatctagttgttcagtccaaaaaaatgtgtcattttgacacatttctctcccatatcaaccatgtctaattgatggtttccatattgtattaagtccccaaacttacttacttactttctttctttctttctttctttctttctttctttctttctttctttctttctttctttctttctttcttttctttctttctttctttctttctttctctctctctttcttgcttgcttgcttgcttgctttccttctttctttctttctttctttctttctttctttctttctttctttctttctttctttctttcttgtcttccttccttgcttccttccttcttccttccttctttccttcctttttctttcttttttggtcttatactttaagttctaggatacatgtgcagaacatgcaggtttgttacatagatatacacgtgccatggtggtttgctgcacccatcaacccgtcatctacattaggtatttctcataatgttatccctcccctagccccccaccccctgacaggctctggtgtgtgatgctcccctctctctgtccatgtgttctcattgttcaactcccacttatgaatgagaacatgcgctgtttgtttttctgtttctgtgttggcttgctgagaatgatggttttcagcttcatccatgtccctgcaaaggacatgaactcattcttttttatggctgcatagtgttccatggtgtatatgtaccacattttctttatccagtctatcattgatgggcatttgggttggttccaagtgtttgctattgtgaatagtgctgcaataaacatacatgtgcatgtgtctttatagcagaatgatttataatcctttgggtatatactcagtaatgggattgctgggtgaaatggtatttctggttctagatacttgaggaatcgccacaccgtcttccacaatggtcgaactaatttatactcccaccaacagtgtaaaatcattcctatttgtccacatcctctccagcatctgttgtttcctgactttttaatgatcgccactctaactggtgtgagatggtatctcattgtggtttcgatttgcatttctctaatgaccagtgattatgagcttttttgcatatgtttgttggccacataaatgtcttcttttgaaaagtgtctattcatatcctttgcccactttttgatggggttgtttgttttttatttgtaaatttgtttaagttccgtctagatttgggacattaccctttgtcagatggatagattgcaaaaatattctcccattctgtaggttgactgttcactctaatgatagtttcttttgctgtgcagaagctctttaattagatcccatttgtcaattttggcttttgttgccattgcttttggtgctttagtcatgaagtctttgcccatgcctatgtcctggatggtattgcctaggttttcttctagagtttttatggttttaggtcttacatgtaaatcttaatccatcttgagttaatttttgtatagggtataaggaagaggtccagtttcagttttctgcatatggcttgccagttttcccaacaccgtttattaaatagggaatcctttccccatttcttgtttttatcaggtttgtcaaagatcagatggttgtagatgtgtggtgttatttctgaggtgtctgttctgttctattggtctactttatccgttttggcaccagtaccatgctgttttggttactgtagccttatagtatagtttgaagtcaggcagcgtgacacctccagctttgttctttttgcttagcattgtcttggctatatgggctctttttggttccacatgaaatttaaagtagttttttctaattctgtgaagaaagtcaatggtagctggatgggataacattgaatctataaattactttgagcagtatggccaatttcatgatattgattcttcctatccattagcatggaatttttttccattttttgtgtcctctcttattttcttgagcagtggtttgtagttctccttgaagaggtccttcacttcccttttaagtagtatttctaggtattttattctctttgtagcaattgtaaatgggagtccactcatgatttggctctctgtttgtctattattggtgtataggaatgcttgtgatttttgcacattgatgttgtatcctgagactttgctgaagttgcttttcaccttaaggagtttttgggcttagacgatggaattttctaaatatacaatcatgttatctgcaaacagagaccattcaacttcctctcttcttatttgaatactctttatttctttctcttgcctgattgccctggctagaacttctaatactatgttgaataggagtggtgagagagggcatccttgtcttgtgccagttttcaaagggaatgcttccagcttttgcccattcagtatgatattggctgtgggtgtatcataaatagctcttattattttgagatacgttccatcaatacctagtttattgagagtttttagcgtgaagggctgttgaattttatccaaggccttttttgcatctattgagataatcctgtgttttttttcatggttctgtttatgtgatggattatgtttattgatttgtgtatgttgatccagccttgcatcccagggatgaagccgacttgatcgtagtggataagctttctgatgtgctgctggattcaatttgccggtattttattgaggattttcgcatcaacattcatcagggatattggcctgaaattttctttttttgttgtgtctctgccaggttttggtatcaggatgatgctggcctcataaaatgagttagggaggagttccactttttccattgtttggaataattttgtaagtaatggtacgagctcctctttgtacctctggtagaattcacctgtgaatctgtctggtcctgggctttttttggttggtagactattaattactgcctcaatttcagaacttgttattggtgtattcagggatttgacttcttcctggtttagcctttggagggtgtatttgtccaggaatttatccatttcttgtagattttctagtttatttgcatggaggtgtttatagtatctctgatggtagtttgtatttctgtgggattagtggtgatatgccctttatcattttttattgtgtctacttgattcttctctcttctcttcttggttagtctggctagtggtctatctattttgtcaattttttttttaaaaaacagctcctggattcattgatttttttttgaaggatttttcatatttctatcttcttcagttgtgctctgatcttagattatttcttgtcttctgctagcttttgaatttgtttgctcttgcttctctagttcttttaattgtgatgttaaggtgttgattttagatctttcccactttcttctgcgggcatttagtgttacaaatttccctctaaacactgctttagctgtatacacactgttctttctacctgggaaactgttttcctccccatccttagcaagtttctattcattcctcaagtttgcttcttccataatatcatctatgacctttctttcttcctcttcttttctttagagacagggtctccctttgtctatgtcacccaggctggagtagtttggtggtatgatcaaagctcactgctgagctaaagccattttccagcctcagtcttccaagtagctaggactacagatgtgtaccaccatgactcgctaattaaaaaaaacatcttttgtagagatggggtctcattatgttgcccaggctggtctcaaactcctttcctcaagtgatcctcttaccttggctccccaaagtgctgggattaaaagtatgagccaccatgcccagccttatgttctttctaattacaatatattactacctaaattttgtcccaccaagaaaggtggatccacttattaaagatgagggttatcttatgttttcttctaaagatagccattatgagacaacgtgagaattgcacgcagagcagtagaaagcaggcttctggggtgaacttcttgggctgaaaacactaaaacattgtgtagtatccagattatttacatagcttccctaacaaagcaagagttcttgagagcttgcaaaggtgtattctcctagtgcaatgttttgattgtgttccatatatttttttaatccctgtggcactattctgaaaatagtgccattaaatgaaataagcagactgtattagtcagcttgggctactgtaacagaataccataaactgggtggcttaaacaatagaaatttatattcacacaattctggaggctagaagttcaagatcaaaattccagctgctttggtttctggtgagcgctctcctccatgcttgcagacagctgtcttctcatctcatcctcatatagcctttctttggtgtgcataagcagagagagggttggggcaggtggagagagagagagagagggagagagagagaacaagctctctgctctctctccttattaatataaggacactaatcctattggattggtgaccctctcttgtgaacttatttaaccttaattacatcctaatggccctatttccaaaaatagccctaatgggggttagggcttcaacatatggattttaggaggacacacacattcagtctataacacagacattcaacaaataattgttcaataaataaatgagtgaatgaatggataaatgaaagaatggatggatgaatataggattatgtgactctgaaagaggaggcaaggaatgagagctgaagtagtccatggacaaatctagaacctggaattcagacatgtataatccagtcttgcttctgtcactaactgtgtgattctagggaaactactccaattgaatggtccctgctttttatttggtcaatgggtcaataataactgcctcatgataccccattttccatgatgtgattattatgcattgcatgcttctatcaaaatatctcatgaatatatttgcctactatgtatctacaaaaattaaaaataaaaacttaagaaaaaactgccccacgtcattagccgttatataatcagaattgagtagagaaatgtggtagtctcttcaaagaaaatttttaaaagagaaaggtcaaagataacattataaataggggccatctttctgaactttatttaagaataaaaaattgaatatatttcccaagtaaggtactttggaaaatcctttgtttatatgttagagaaataagatacttttgaaaatataatttatagaccaaaatatatggtctggtaaaaataagctatagataccagaaacatcatttgtatgattttctctcaaaccagtatttatccaaccaagagaaactttaaaaataatattagagtttggcagcaattgccacctcacaatgcatgtgacttctctccaacaaaaagatctttaaagacttggaatgtgcttgtctaaaggacttgaaaataattagtgatagaaagctttttctcaggttatgaactttagagttacggattgattaaaattactgagtagaaataactttttagagttctgttggttcaggatgaggtttttctcatgtttccttctaaaagtgcccacaatgtagtaacattgtaactgcatgcggagcagtgggaaacaggcttcttctggagtgagacttcctggtctcaagtcctcctcaggggtcctgtgggcttgagtgatttgggaaactttaattatctgcccctcagtttatttacatgtcacgtaggaataataattgtatctaaccaattagagttgttgtaagggtaaaatgtgacattgtgtgtcaggagcttagcacagagctggcagaagaacccaataaatgttaacaagacaacagcagaagcagcttggctaaaatgcagatctagcatagggttattagggcaaaagccaattattatattttatcgattgatttttataagttattgctctttttccaatttcttgtttcctagaagttcagttatctctggatggtctaattatttgactctgggttggtttgaaatggaagcactgaccgttttctaactaacaatgaaaacgagggttcaggagagatcacaaacttcttgtttacgtgaaagaaaaatttaggtggcttagtttgtaatactctgagataagccattgaaaaaagtaaaaagtttgcttctttaaaatattgccttgtggcacattttctttgctgatctttattatcattggccattacaaaactctgcaagtataagtcagttgttgatgcacctgtcatgtgccagacccggctttgtgttcatctcagccagaattgctccaaattagtttaatcagttaaaatattggctgtgaacttagttttcttctttcgaacatacatacatttacacatagaacataatgacatgagtagagagtgaatatctcttatgctgtgttaaataggtggaaaggaatagtggaaacagattacactggagtcagaaattcattaactaattttgaatcaatgcttgggcaatacattatgttccaacaatgtaatcctaaaatgtgatattacaatgaagatgtgcttccttgtgtcattttaaaaataaatagttctcacacttttaagtttgattttagattctacagtgacaccttacatattgaaacaggcaatctatgttaactaagacaggaatattcattaaaatggcaacaacagcaacattgcacttctaagatacctaacaacggtggtcagcatcaggaggctgacaaataatgtgtgcttgataatgaagaagaatgaaataatttgagattttagacatatgcaacagattttttgtgtttgttttattttttattttttggctttattgaggtataattggcaaataataattgtatacattcaaggtgtacaacgtgatgttttgatatacatatacattgtaaaatgattaccacaatcaagctaattaagatacccatcacctcatgtagttatgtgtgtgtgagtgtgtgtgtgtgtgtgtgtagtgaaaatacttaagatctactcccttagcaaatttcatgtatacaatacattattattaactatagacacaatgctgtatattaggtctccagaatttattcatcttacaagtgccagtttgtaccctttaaccaacatctccccatttcccctacctcctagttcttgggaacaaccattctactctctgttcctatcattttttactttagattccacatataagtgaaatcatgcagtatttgtctttttgtgtttggcttatttcacttagcataatatcctccaggtttgtccacattgtcccaaatggcagggttttcttctttttaaaaagctaaatagtattccattgtgtatgtaccacattttaaaatgattcatccttcgcattcaggttgtttctatattttggctactgttgataatgttgcagtcaatgactatgtgagtgcagacatctcattgagatggcgattttatttactttggaaatatacacagaagtgtgattgctggatcataaaggagttgtattttcaattttttgaggactgtttatactgtattccctaatggctattccagtttaaattcctaccaacagtatataaagagccccttttctccacatcttcgccaataacagtcattctaacagctgagaggtgatatctcattgtggttttttgatttgcgtttccatgatgactagtgatattcagtatcatttcatatacttgatcgctattgtatgtcttctttgaaaaaacatctattcaggtcctttttcccatatttaaattgagttattttattattaatgttttttgctattgagttgcatgagttccttatatatttttggatattggccccttaccagatatatggtttgcaaatattttctcccattccataggttttctttgtttttgttgattgtttcctttgctttgcagaaatttttagttagatatagtcccacatgtttatttttgcttttattgcctatgcttttggggtcatattaaaaaaaattattgccaagaccaatgtcatggagtctttctcctatacttttctctgtaagttttatgatttcaggttgtaggtttaagtctttaatccattttgagttgagttttttgtatggtgtgcgataagtaagggtcaaattttattttttggcgttagatattcagttttctcagcaccatttattgaagagactaccctttctccattgtgtgttgttggcacccttcttgaagatcagttggctgtatatgtgtggctttgtttctcggctttctattcggttccatcagtctatgtgtatgtttttatgccagttgcactagatgtctttgaataacagtatttctcccctaggaccctttaggttggcttgggcacaaaatgaattttgactggtttggcatttatttcagggaaaaagtttaatttatttatgagaaagcaagtgcacttgacgtgttgcatactcttaacactagataactaagaagtgaagtcttaatggttttaaaatgaggaggaagactaccagctatccaaaagattgtctttgatgtgtagttaagaaagagaaatgtaatataataacaaatgtgtattactataaaagcctacattacaaagtatttattaagctttgcaatattgtttttaaaatagtaaatatagtttggatattcaattttatcttgtgagaaattaaaaacagagaaaatgccaagagaagtgaagattagttaatgggaccctgagtttgaacgtcattagtgcccaaggaaatattacagattctcttagaatataatgaaataaaaaaagaaggctgggtgaggtggttcatgcctgtaattccagcactttgggtggctgaggtgggagaatcatttgagcccaggagtttgagaccagcctgggcaacatagtgagaccccatttttacaaaaaataaattaaaaattaggctggcatggtgacacatatgtgtagtcccagctacttgggagactgaggcaggaagattgcttgaacccaggaggtcaaggatgcagtgagccgtattcatcctaatgcattccagcctgggcaacaaagcaagaccctgtctcaaaaaaaaaaaaaaaaaaaaaaggctgcaatcaagtttatagacatttaccctccagaagcaccatggactgtctctggttttggcctgggctcaagagggaccttctttcttatggaaaggtcagctgtcccctttcctacattcacatatgctctgtccataccatgaggcttgcttgccttattctttcttctatgaaagatgtcaatgaagtccagcatgtctattactcttactgctgtttgggcaacctctagtacttccaaagtgaagttggtgaagtggaaaagtctgatgtccaaatttaagaaaatttcctcaagtatgaggagtcttctgttttgctctgtctgccttggtgatcaaccagaatttgaatgtgaatcaatcgtttttcaaaggaatgttgggtgatttgtcttccggttaggaaacctcatataaattgtttatcccaaaacaaaccctcatgagtttctttcttattattaacccccatacttgcatgattattgcttccctctttggccactaagtcaatagtaaaactcacaataaaatattcaggaaagagcctcttttaatagttttgacagttgtctaggatttggcaattatagggacagagattctttatgatgcttaatattctagaatacttaattgagaccactgcatcagaatattctattctctatgctttttccttgaggataaattaagaagcagtgagaagtaataggaaataaccaattcaaatctatcttagaaggataggagttggttcagcttctttgctccctagttgtttcatcaaatgaaggtagcaacatgaagagaatttgttccaataatgataagtaggtagcatgaaaaaatggggagtaggaggggaactgtacactcttccatttgaatgataaataaaaatttttattaatgtagtatcttaacatctcaaagtttatttacattgatagaatcatacaatcattttgataaaatgcttctctttatacataattctgtccaaggtagtgatttttaaaatgaattatttcagctataggcaaattcagtagataaatactatgctcacttttgccctagaacctcttttggtctttcatgatgtaaccgaaactgaagattggtaaaatattgtgtgctttttaagattattttctgcatgttaattagtagaattgtcaagctaaaaaatcacaaagggcaagaattggtcaactatcattagaacaaggaataatataaagagacgtgtgcaaatagacaccaaaaactacgtctttaaagttgatattcgatataagatgttcataaagcacaagaaatttgacagtacctttgtttaaaaaagatgcttgcactgatggacggtaaagcaaacatttcatagaaatagcttatctcactgaagtgctccacagcatagtgtgagctgggtccacatgacctaaggagatctcacaggtatcttctcagaggaatatacatgcctaggaaccagacaatcagcttcaagaacaattgaaagttaattgtattattgttggccatgccacccactgccaatagactacttgcagatccagcccctttacactgttgagcatttattccaccagctttcagacccgacttttattccaccagtagagtgctgctgaagatacagaaaataatttgttgatacttcttaatctaatcctaggaagtcagccatagaatgtcacctgatacagaaacaatgtttctagaacccacactgcacaatcttgtataccatcccctacgacacacacaggcaaatacacatgccttcttgcttttaaatatttatcattttggaatcgaccagtactgtatttgatacctgatgctttctttaggtaagcatataaatctgggtgccttatagttacaccttggcagtaactacaaaaaaaattgtttaaggtccatcaacttctgcctacccccacaaaaaaaaaattaaaaaccaaatcacatcttttctagaaacatcacaggggaattccatgactaatgttatgcaaaacttaaatccactatccctgtatatttctgcaattcactttcttagtctttcagtatctcacacatccagcaggtgctgctttcagactctctcctctcaaaattctcactctcctcataatccagcactctgcatttctgttttttcagtcatacagagacacttattcaatatagtctttttctattctctgggttacccagcgactggatttggctaataaaggaggacctaagagttgatgcaagaagactccttcttcctgggggcacagtgcgcagcagataatgattacagttagcctctgctctgaaatctcttttattcttgccatgcctacacttagggttttcctttcatagaagatgtgtgtgtatgtactttctatggctattggccagtcagttcatgtcacagacccatgggagatggatgctttgtgcctcctaccaactggctgagagtgttgttttcctctgacactgcagctgacctcacaggcttcccaggtgtgcatggcatggcaatgaaacctcactggttggcagccacaggtgtgcatgatttgttttttcttttttcgttgtttagattcttgtggtaagaattcagcaggtgtgtgatgccagcatagaatctccaccctggcacagaggccagctgccctcaaaaaaaggtatttcttgttggtctcgcaacactactggcctgaatccctgttttcctggaagcctcacctaagggaaagactctgactaatgaattaggataaactaatcacagatgaacatgaagcattttttcagatgagtatgagtctccttatgtgaatgtactgtacgggtaggagcaggttacctggctttgaactcaagttttttttttcctagtttgaggtagtattattgcaattatagggatgtaggaaatcctggacctggtttccaaagggatataagccatcctagagtgctgttgttgacatataaatttctgctcacgtgattgagactaaacagtaggagcacagatggagagtgatcctgtgtggagttcttccatcttcctggaatctccccaggaagtcaccaaccctgggacccaaccagttcagtatagggcaagataaatctgaaggtcattccagacctcatctagccttaatgaagggtggggagagattagctacagtaacactgtttgagagaaccagagagcaagagaaggaacgcaattgctgtcagtctaagtcagcagtgtagagctgaagccggttaaccttttccagtcctctctctccattaccttactaaggcttctcttggctaggtcatgatatctaaagaaatagatgcttgatagataaatacctaaagaaacagaaacacacaccttagattactcagttttcctttgtcacagaccctttcccaatttttctctttagagtgtcacttggagtttatttgatgttgtttttacttgcatacacatttacttgcacaggtgggggcttagagggcagggagaccacatactgattttccctctggactcccacacctctctgaatataagcactggtgaggaatgagtcaggaatattgccccagaacatacccatatagtatggatattaaatagaaatacagaagcttgatgccattttgccttcatctccaaaagtaaatctaattgctaattcccttaggtaatagaaatgtaccacaatgccatggtgacacaggtcagagaagcatttgttccaaagagcagcagatgggatctataaatcatacttggggaaaggaggtgtcacatgtgagtatcggatagtcagtagactagtctctgtacctgcatcttaacttttacaacacagatatgtattttaacatgcactcgatatagagtcactagctgaagagaagcgactatactagcccagggaagtaaagattaaacatcatatgaactgttaaaatcagttttacgtctgttatccttttgcaatgctatttcatatccgtctttagctattgctgatgtgttaattagagcatcccttaagactatagttcttctatagtaacaaataaataagataaaacccttacactgagccccaggattgagaagggtcagcggtatgtctaacacttgcctagagcttactttatatccaagtcattatctcctgtaagagacaaggagagataaaaatagatttcttgcccaatggatgatactcaagaagaaaaagaattatcattatgtttaataagagaactgacaagcaatcataattctttccattaagtaaatatgttagaaaacatttattatgaaatgacacattatgcaagccaggaatcaaagatgacatccttgcattaaatacggtagatgccattaaggaaaacagtcaatatgtcaccaagccatggcctgtaaaaattaaattgatttggtaaatgtaagtaagatagatctgtttgctttcatcatcaattttgagtgggtgaacaggtgatgtcaccaacctgggagcgataaagatgcaggaccatctggaaaggcaggtgatgaatgggcaactgcttttggatagtgacagtgctgtggtactttgtcacttgggatgcagtacttaataacttttcaatgccatcataataaatttcactgccttattaatatagaaatggtgagttattaccatgatggtgagtgtaaataacgggagatgcagccgtcaaaagctgattgtttgggcatgtttctttaagcacacagttgactcgtgataatcaacctatgtctataccagtagagtttattgcacttgtcaaaggaaaaagtagtattatttaaaattatatgaagctgtaataaacaagtttaatatattatcagacttttcctgtaagtttccaaacatgaggcagtaaatcatttttgataatgtcttttcatgtaaaataatgtccttatgcagtaataatgtcctttcttaactattaacaaaacagtcgacttctttctatgtgttttaaagggtatttttatttgtacttttcaatcattggaactctgtggaatgaaacccttttgcaaataaagagctaaggcaggaaccttagaacatttcattaacaagctcaaaagttgctgagtacaggccatgtcacacgttcccattttaattgaacagatgtacttaagagtaaaccacagcaaacgcaatacagacaaaattataaacatgtgtcactaagaagcaagcaggaaagagcctctgatgagcatctgtgtgtattttatgaagccaaagactaccacttcataagtttgtcactgatgtctccagtttaatgaggagaaacaaaatatgtagataggtgtaagttgaagatgaattactagatcaatcacttagcaccattcagagtgtctgccattgtgcggtgggaaaataatgagatccgggatgctgttcttatttatatactgcgtgttcagtctcggggtggaatatggaaaacttcctctttcatgtcactgtggtctttatacagtttttcggccaggctgacttttaattctgacattgtctttcaggctgcagtctgccagcctcttaaatgaaatgcctctccaccatttctattactgctgaaaagagagccagcagtctattaacaggcaataaagttcaggaagcccaggactcatttcttgggtcagaggtgaaaattgcatactaaatgaaacaaaggtgtgccttgatcgctcaagaagcagcaccagaaagagcgcacgtgttgttagccagaagtctcccacttaaagggaaaggaataattgtaataatgttggccgatggagttaagtactcagttgagagaaattatatcaatctgacaaatatagccttcacaggagataaagtctctaatgaccttaaatgcatatatttatcatttaattcaacaagcctattcccttgggctttggaccaaatacatttcccctaaagtttagaaattttttagtagcccagagaataatggccatttgtcagagggtttcaaagctaaacacagttggaagcaaaggacaggagggaaaaaaatggctaatagagtctttccaccttagagaatattaatatgaagttttgttgatgcatgagctgcggtattttgtggctgaacagtaggtggcatacagggtagtgaagaaatggggaaattttaatctaagcgattttcatctgatttcattaacttccgaatatgtcatcagcgtacacagaacattaatttgcaaaaaaataggaacactaaatagtcatgaaatgtgctagttaaatgtggaaaaatcaaaaggatcccacagaaatggaagcaaaaggtctaatgtttcctcaggtaaagtgtgtgtgaaacagcaaagccccaagaataaaggggcccttgtgtatggtgggcttttcctcactgttattcttggtctcaacttgatgaagtgtattcgtgatatacacgaagcactgtgactcttgtgtctctctttgtgagactgtccatgcctttgttcctgctgtcagtcagttgttctttctcttgggcagccacattggtaaccgcagtatctacttgcaaatagatttctgtaaaaccatattatccttcaggcctttactcctagcccccacccctctttcctcaacaatctggccattcatgtggcatagctcccttgcttgcttctttgccatatgtctagtggtttgtgtttcagggaggctgtgtgatacactggaatgaaaactgggctgggtgccaggaaccttgaatttttgcacaagtcagacttgggaacttggaaaagtcatttgactttaccctctgaagtctcactcaggtctcttgtagctgtaactctatgagtcttcgaattctgtctcttacacctgctctttagttcttttcatctttatggacatgttctatattgtcatggttttggaggttttaatttattgttgttgttgagaaaagcccaccaacaacaataaacaaaacctccaaaataattacttttaatggcaaaactgcaattacttttacaccaacctaatatattggggcatgttttgagaagaatacaagttaactttaaattacatagaaaatagatacttgttttatcatttctcccgtgtgaaactagtgtctagttgtgttttatatatctgaaatcaaagcacctttgataggtgcatctctctctgcattttatatgttagcagagaaggtggcttaagaccaaagctttgttttaagaggaaagtaaattgtttagagagataattctattcctcgccatctttgaaaagatataggtatgaactgcattctttctcggggtatgactttagttcagcctcaatattgcatttgatcctctcaaatgtagcatggctgtagtggacttttgtcaacaacagcaaaagaggcagtataacacatggaccaagagcaggagttctagagattcatggactgtgttcaaattctctaccactgactagctttgtgaccttaagcaagtacttaaccacttcttgcctcaatttcctcatcttttaaatggtattaacaataggatctacctcatagaatttttgtgaatattaaatatgaatatttcattgtaaagtattgtgaagagcttagagcagggcttggtaaactgtagtgagcacctcaaagcaaactgattttaataatcatcatcaccatcatccttccaaagtcaagggtgctctttttatccttgtgaaggaaggattgtggaattcattcttttaggttagagctcttgaggttggcagagccaccacaccttgaattaaatattgtcccctttctgaataccactgggaagtggccttcactagacctaacatatttgaaacattgattcatgtttaaatggttcttttgctgaagactttagtaagtgtccctaaacagtgcacaggaggaggactaggggttttggcttcgtgtctaattaatttatgttcttgtagtgcggtggagcagggttgagagaggtaagagctgtacatttaaaccttcataaagcgttctccttcatccctaactccatgaaagaaaactctcttccaagagctcccttttaagggttatctcttttacttttttactaccccttaatttggcccccagcactcttgtgtcttgtaaactctgcctcctcaggcttcagccagagtgtaatctagctggttttctctagcatggagaagtatgatctagtttagagaactaggggaagatccgcatgcttttattccagttcattctctttttcagtatggactgacatggcatctttcagaataacctaataacaaatatgcctcatgacagcaagtatcttcccaaggcatcagtgttttgtcttaaatgaagaaggcatactccgcccattaacaagatgttgaccttattccatatgaaataacaaccctggccatcctgtgaatttgcttttttttcccccctgggctcttctccatcaatggcctgttaaatgagaatggctgtgagtcactgagaataatatcataactaaatatattgcgataaagtgtatggaagtatttcagataagtgataatacatctaatctttttgtacagtcatttgtttattcttaaatttttctttaattatggtacctggttgtccagtgagtcctgggactttctgggcagaaatttgaggattcatagattcagactctacagaaaatctattacagcttttcacatctaaagctatgctgttcatcattgcctttgaaccataagaaatgtcaaaaattgtaggagcttttttctttttttttttcttttttttttttggtgtaactttttttttttttttttttttattatactttaagttttagggtctgaggtaccgggttcatctcactagggagtgccagaaaggagcttttttcttacagagaaattccaaaatatatgctactggaaatggagggcaaactgcccaactcacaggatattagaaggggtatacttgaattatgtggttaaggatttatggttgaaagtaacagtagcccaaagttgagtttccctgagtgtaggtagattcttcctcaaggaagaacttgaagggcaagaccagttataggaggctctggtttccctggagtgtagttaactcctttcaattctcctaaccattaagactgaatgttaatgtctgctagcatctgcagtatgaactaaattgtcacaaaactaccacatgctatgattctttacttactcaaactctgctatagcctaaggtctctcttcatgcaggggcttccattgagaacagtgtggatttagtaatacatttaattggaatgtttaataagaagttagagcctttttttaatcttggaaaaggcatcaatcttgagaacaccagatgtgaatatcattttaacaagagaattttcactttgcttgtatcttccaaagcatggagattctcctttgaagatattcattctatagaatattgtcagcaatataaaggtagaagaatagttgagtttgactacagataagccaggttaaaaatacagaaagcacttgatgaaaatcatgagttgttaggattcaaattatagagctccaataaggacccctgaacactgatttttcaggcacattaccaaaggtactatactgaggtggtatatgatgtcacttggtgggcttcactcaagtgttcatttgaagtttgattccttactcacctaccataactgattgatagaaacatagatctccaattgactttagtttctgctccacagatctgttatgaatctcactgagaatctaagatacagttgtaaagtatagttgaagagttttggtttctatgtatagtccaactaagcacctcagagcactgattgccaattgcaatcctctaagttgtgttgagaaaagaaaaataagttatttcaccttcagtttccatgaaataggatgaagttactataatcaggtaaggtgacacttaaaatattaaaacttttgtaaagaaaggcaaaattatgatgtgatatgtgctatagacatagctgaacatgactgtttttaaaccaaattctggtagaatagatttagtagagttggtatgaggctcgaggattagttagttccagttgagaaaaatagatgaaaaagaagtactaattgccacagtaggatgttagaattcattacccacatgggtaagggttaaaaatttagcataaatgagatagtatttctaccatcagctgttcctcaccaagattctgttgctgtggatttgtctgttatccttttgaaagccacttacgtttttaactttgttataagtcttataagtttatgcagttctcctggaaaactttgtctatatttactctttcatgcattaaatagtacctgttaattttcgtgtaggccctaaattcttcctccctaggaggcccttaagcttagcagtttagaaaggagagagactgcctttgggacagttatctttttgtctgcttgtcctagggctcaaaacccttctaccatcttggtcttctgttctataaaaggaaaaggtgattttttttttttttgtggctctaaagaaggcatacagttcttgatgtaataagctggctctcgatacagtatttgaaacagggccactcacaggtagattacaaaaatgtcacaagaaaattatgtagtaatgaaaactggtctatctaagttttaaaaaatgagtgccctagtattttcaggaagaatggaaacctctatttaatataagtcctttggtcattgagatgtgtcagaaccctgccctttattctgaagtgccattgtgttagcgctgaaatgtaaaaataataaacagctgacattttaggcacagactaaacatcaagcaaatgacattacatcaaagctcttgagagagttacaagacgacaatatgccaaaagaagaaaagtgagaaatagtcacaaagtcttctgtttgcagtagtggatttgccagtgccagtgcatttacccatgcttataattagggaggttttgtttgcatgcaaaattgtttttcaagttggatttacataaggcgctggtaaagtgcataaaataacacatggttccaaaattcattcttatttttgttcattattaattaattagtatattaacttcaaagtgtgtgtggtgtgtctaccgtgtttgcaaaatgcccagagaatatagcagtgaaaaatgatagacttcttttcctcacctcttcctttttgcttcctttcttccctttttctgtctttattttctctagttttcattcatttatcttttcttttccttaggcaaatgtcagtgtaactccttttacctaatggttttggttaaattaattatctatctaatatatgtgtcaccttccttcagagcaaatattcataggatttgaccatctgaggcacaattagtctttttttgaggatgcaggtgggaagcacacctgtaattagtccttgcagggcatttgtctatacctgaaattatttgcaggtgttaagcatgtgcttatgaagaagggaactaggtatctgaggtccagaaaaaaaattgcctcttaattttaatattattttctctcttccttatgtcttgatttcttggaaagcaaatgcatctagttttaacttaatgtcctgaatgactgactgcaaacaggaggtagaaatggagctttggctcttttatgtggttcatgtaagtattctctctagctctgaggatctacttatatttgacccttttaggaaaaatgctgtaaggttttccagttttgaggataaaattgctcattaaaatctgtgatgtgtagcactttaatgaatgttagccacattttaaggctattgttatatagctcttagtgttcccaggattcctaataaagagcaaaattatctaaactatttaatgattactagtgggtattggtaagcttttttatgagcttttatgaaagcctcttaaccatatgtcatgtaccatggcataaaaaatagaaacagaaatgcggcaacaaggatctcaatgctctgttgacatcaaatttggcagattttgaaaattctgtgatcatttttctctttatgtgacactactcttgttcattcttcaaaaacatttgccttagcgtggggaattatagataatttgatgcaacaggtttaagttaccattttcataatgaaaagaatagcttagcatgatcctgattttccttggtttcctcccattctcaaaagaagcagaggtattcacatttctttgtctaacagttttataatgtcttaagagattaacagtgagcatgaatgagggcctacggattagacaacaaaaagcctgggacgtccactaccttgcttgcagattttacattttccagcattgctgagcgagtatagaaactaagaaaagataataagtaccagagtctcaaaagtgtttagtgattcaaaaaattcagatgacatgtcagaactgacagactgatggagccgtccgtggcagggcccacttttttgtcttatgttcggctctcatactgagtgaatgcagatgttatcgcggtaccccagacagacagtcagtgaaatgtgacaagctgtcagcaaagttacactacgttgattttgttaaaacatccacaagctttatagtttctttttatacaaaaaactcttacctcatttagtcaagaaaatggaagctgttgaggagatcacttgtgcttttattatccttagaataccttggttttttttctctggggaaattacacttagcaaattaagtagtaatgtaccccaagtcttgaatctcaaagtatctcacagtaattgtttttcttttgatttgttctacaatttttgctcaatttacattgcacctcaacacttggcaaagaatgtttcaagaacagaaggagtgaattttcttcatttaaattaggagtcaagatgagaggttaaaagtctgaagggccactttaaacaaaaaagctttcttaaaagaagcttaggcatggaaaatgaaactgtgaattttgagtaattaaaaactaagacctttgcttttactctttatttttaggcactgaaaattaacattggcaggagaaaaatccccatcaaaaacaaacattcaatcctttcatgaaaatcaattctgttttccatatacggtttagacatttagatttttcttataaaattggaaaaaaaaaagatgatattctagagaatcttcactgctatatggtatttatatctaaaagttagctttgcttattaagtgatcattttttgacatcaatttcaaattcaatttaactcaggaatttataagtcagaacaagtaaaacaatagttaattgagcaaaaatgtaaaaagaacatatacttggaaactgccgtcttaacggtgttgcttttactgataataatgctatcttttaaaccaaagaagacatcagtgatgacatttgactttaacatggcagtttatttttagcctctgggtgcaataattggttgttttttaccccatgtcaaagtgcttctgttgtctataatctatttaattttgaattacaagttgtttggtagaagattactttgcaatcctagtttccacaaattaacctctgtttatacattcacttttgaaaaccaaaggtgaaaggaaaacatgagccacacttgttgtgttcaatttatattgtcaccaaggacattaacatacaatgagaaactgttctgtgattttgcaaaatgaaaagtcaagacagtttgaagatagcatctagcccagtgtttttgtaaaacacagaactaaacaatcaaacaaaattatgcatatggaggaaatgatttagaatatgtttcgctgctaatcgcactcatgctgaagttttaaatttcatctgtctgctcagatctattgtgagccattaagtggcttccttttttcccgacaaattgaatgctgcaactgcaaggagctcttttgttcttttaattcagtcagcatggaaatgattttctcatttcaggcccttttctgtcctctcttcattgtgtcaataaaatagagttgtgcagagctgctctaatcagcttagagtgctaattcattgcgccgggatgctatctgtgtttggctacaggtgggcactctaaggggtcagtctccaggggagtgtaattgtgtgtctcctggggcttgtttgcagaatgacctaaagctgaagccccagctcaggaagggggggaaaaactgaacaaacatatgcccatgcaaacatatacagctgtattttcatggcatccatttacttggttcggcatcctgaggttctagcaacattccttgcattttacctgtcctcagcgttctatgattagccataaaacacgaattcttttaaactttgcacacattttctaaaggtacaagctttttggtatttccaagatacaagttaaaggttaggctaggatttaacctatgggtaatacgaccaaactaaacttaaaaagagaaatagaaactgccaattttgaaaaatatatcattttgtgtcctatgaaagtagcttaatacataaatatggaaatattatgaactagtaaattaagctttatggggactgaggaatttctggcaactttggaagagatataatgattagttttttggaataaagagaaaaactgtaggcattaggtttttgagatttaacatgttcttgggtagcctaggggaatggcagatctttctgggattattgttagtgtgagtcaaaaatatgctgtgaatatgaacttatttactggggtttgagatttttggtgttaggattaaaaatgctataacatcttgtttttattgttttctaacaatattttaattttttactttgatttacattgagattaattccactctcaatggaaaatcttcaggactttataactcacgttgttatgtaataactataagcaggtttgtgaagtagaaagaaaagaagcaataaaagatttcagctatgcgaatctactggttagctatggagggactgaataaatattctttgatttacttaagaaacttgagacttgcctatatattaggaaaaaaagtgtattctgcttatcaacaaaagaactggggggaaatgtcatactatttaaatgatttgagaagaaatttatagttatgttgtgatgaattcaactagcttcacaacatgtcagtttacagtttgtattgttatatatgaagctttgtataaagacagtaattggcttgtggaaatgcaagttcttaaaagatacctaagaaaaaaataaggttatcttcatgattagaagatagtattttattttaattttaaaattatttccctctctaatgttttggctacataccagctggtttggttgatgttataacactactgccttttggaaaagattctgaattttacttagctatttacattacttatttagggttaacttggagtagcatcaggagatgaaggcaaaaatatggcaacttgtataaaaccgatctttttttattgtcctccatttggaaacatttttatgtggggctccaagatagtcagaatttaaattcctcagtctcaattagagtgagttctccattttaattgttattaataattaatgatttttggtataaatgattttatttctaagcaaaaatagtattaacattattttccaaaattgatgaagtagttgattcacttaattttgtgttttaaagtgctttcttcttaattcccgactcattatcctatgattttctttctttccagataactgagttggaggcaattttagcattagctatctcttataaacagccaaatcctttggccatgcttaggcttatgtagcatgaattattcaatgagaaggaaaaaagcagtgttttagcaacttgttttggtgatttttatttttatgaaaataaattgtagcctcgtgggataaatcaacaatgtaacttcccttttggggagaggctctaagtcacatcagcatagttttggtccagacagcaaagctctaaccctcattcagctcaaatgggccaccaaagagagcagagagagataagattgtgtacttgagagggacatttttaatcaagaaattgtcatctcttcttaggtcatctatttccctaattcttttctgcgttgaatagcttcgttgcaagaaaaatgttggtgaaatgatttggtcctgagtcctattgcagaatgctctgagtatgggctcaaatgcctattggacaaaatgaagttggtttgtctttactgtttattatgattgtcacttctaagctttactatgatgtttatgattatttcactccctgaatgaataggatatgaaattagacattaaaaattttagtggtggaataaaattgttggtttggtttttctgctaccactaactcttaaggccatacttttccccccaacaagtttcagaaaaaaaatattgcaaggaatatttatgtgctttgagtttttacgttagacaactccacagttaaactaccacatcagagtcaagaagataatttcatagtaaagttagctaattactgagatagctcctttaatatgtgactcccacttgtagatacctagcccacatatgtcttttctggtgtgagagattgtttttataaaattgttaaaaatgaccggttttaagaaattattaacttccattaatatatttctttaaatctaactcagtgatcttctattagaactcaattattttctgccttacaggaaaatctacttgttttaaatattagtaactacggctatgtaaaatgaaatgtaaaagaaacaaaacgtatcagatttgaatgattctcctttccctgttttagctaaaaaataaaaataaaaacatcacttttacttagttctgtagttggcctccacaaaacaatttctagaataaatgcttatccttcctaaataagaggtcattgttgcagttttccgtgaatcaaagatgaatagggtccatctattatcaattcctcaatcagagaaaaaaggaaattaagttcctaattaggtgaatttggactaaagaggtggggcattgaagggataaggaaaattgagaggtagttgatgccatttcagactaatgataggagaggaaatgaagatgggggtggtaggagttgagcttgaaaggtcagtgaccttattaggacaagagtagtggtagatcttcaaaagcttttacctgcaataggctgacaaggcgtcaggttctggggatggtcaaagattcaaacacttgagaaagagtgtggtaaaaataagattacatattttaataagggatacatttgaatattattaacaaaagaaaaatgaccgttatcagctttgtaattataatttttgctgaatcatttttctatgtactttaaaacattcattttaggtattaactgggtttactttaatgtggaatagataatgcttcttttgagggttagacttcactgttagcataatgaatagttctcttatattaatacctactagaaagatacataaatacattactgtgtagatttatcaccttagatacaaaattgcaattattgactaaaatatctatcatatagatatgcaatacttttttatgtagacaaaactttgatttttccttaataattaaattatccaggtattcattgacaaaaatatgttaagatttgatctttagccacagtccttcagaagttcttcagcaaagggattgtcagaataaagtgggtacatctatattaagaaacaaaagataatttatataaaaaaatcttttcattaatgtgtttttctaaatttttaaaatataaacattgtaaagaatataatgaatgaataattctggtgttcaggaatgtaaatcggattagttagatgagaaaattatgagatttggggcaatttttaagctctttaggttatatgtgggttactagtactataattttatgaaacaacactttttaacatttagtgttctttattgagtagcatgggtgcttcagagatggctttgacctggatatttttatccagaaaacaagagatttttgttttattatgaaagacccccagtaaataaaatatttcagagtctttccactttaattctctctgtggtaaatacacagccatagacctgttattactttaccatccgatagagatataacatgagtcacataagtaattgaaaatgttgtaacagctgcatttataaaaagtaaaaaaaaggtataatttaaataatatatctaaccagaggatccaaaatattgtaatttctaaatgcaaaaactaaatgactgaaatactgtacctattttgtactaaaatctttgaaatctggtatgtatttcacacttataacacctcataatttggactagccacatttcaagcacttagtagctgcatgtggctactggctattgtattctacatagccttggaaaatctcgaagactcaatcttttacagtgtgattcagctcaatgttagttatgacagagaaggaagcactgaaagccactgtggagccatctggcccagcctactcattttataaatgaggacactgaaggtcaagaagggtcagttacttgctcaaggtcacccaactactttgggggtagagcttagaccaggttccaagtctcttcctgaattttaatttatttttagttctgttaaaatatgctgcttttgttggctgcttatgtaaaggtgttgacatgtgaagtgtaagagaataacaagcacaaaaccaactaacaaccaaataaacaaaatagggaattgttcagatagtcttgaaactttgaatgttgaaggaataccactcaggtaaaggattatttgttaagattcttgcataaactgcatatcacttcattagactctatcatatttttataaataaatattgatattataagtagatatattaattgaattgtagccattataaacaatttattttggtatctctctcagccccaaacaggaaaataatggcagggcttgcatttcattttacattgagttactggagtttttaacttggattgttgtgattgaagccttgataggaaaatgactgagtccctgtctcatattcattggcccacagagactcaaagaagaaaagatcgttcattcttctgcatttttctttccttagacaatatctgcaattaagccccacctgacagggctagtaaaatgctgccgattacaatttatctagaaagcatagacgggaaatatacaggtcttcttttacagaattggcagctgatggttattgaacctgagctaacattcccaaatgaaatgaggtggggcaatttgagtcatatgataacaatgttgtcatcctggagaacagtctcggtatgaatcagcacagttctgtgaaaattaaacatgtgaacaccaagcaaatgccacagaacctccttcagttacaggcatgcatacctgtatccataggagggccccccactagagcgtgaagtggcccaatgttcctggagaaagagaggggctgctgtcaccgactagacgaggtttgtaatagtatcgtcctgttttcactctccacagtagaaaatttctactaggctaacaaggcagagggtaatgagaaacatgccaagtttaaaaaaaagaaaaagagcaagaaggaggggtctaacctacgaacaggaaacaaatgtgatcaattactccaagtgtggagctcacagataccttatcttagggctccttaaaataaaagcctgattgttaccaaatgcgtctaagaagtgagggagaaaaacactgggggaggggggaaaggggaggatgagagggaggggaatgggggtgaacatgactttatattgatgtaaaaaaatgcagttccactctggttctcagtctcctgaagtatttagagaagtggttaacaaccaatcatagccttaactgtgcaggcagtaaaacaactcaatatttgaaaaataaaagtacccaaatatgacatgagggcagggggaggtagaccgaaatagtaatgtatcatgctgctgaagatgcagtcattctaaggcatttgttctgttcttcataattatttgactaaaatgttttaaagacagtctgttttttgaaatgattgcaaataaaaggtctatggcaataaatgtgtagaagttattaatcttttctttgactcagaattgaaatattcatttttacattagctgtctggcaaggaagtctacatataaaatgtttacttctcttatgaaataaataataatagtaattacagtgttaataccactcatctttaaaggattgctttgtagttcctgaagaagaacgaggtagaatcccatgaaaaggtgtgagtatattctactcatcctcaaatcaggagggaaatctcatagttaaggctatgagtcaggacctcagggctggtggatcttggctacatattccccaaatttcccataagtgcaatagaattaacactatccctttcttggagatcctgggtcagtaggtgttacaggattatgttatgaggtgtgactataaagtagtaagattgtttttcacactccacacccagaaacagcctctttttacttcagtgaataaaaacatactaatttttctaagggcattcacctcatctggtccttatgcacatgtgtgcacacacagacagaatctgcaatattcccatctttctccactctcacatacactaccactgctttctcagggaacattgacaaatgcatatggaatagagttatttcggttgctagaaatatttttttttaaggctcagtgtcttgctgggaagatgccctgtagataagcagagaaataatcgcccattttcagaggactttgttagaatggtcttgtcatcctgttctgcccatatttttccaattaagttctagcctgttggaatcgaatgtcttcatgggatggcagactgctcaagtaggctattttgcacatattctgtagcatgcttagcaatggggcttgtcagtcagtcaacacgtatttattgggcgtttatgtggcgaaccagacaaatccattccctgagctcttgctcttatgttcacagaggcctgtcatccacacagaatttctaatagaaattttctttttcaaagtgaactcatctacatttgaatcagaagaagggaaggtgagagtaattgaatgcttttgttatgggtcatttcaattcatttaagggtagataacttctcttgtagatatctttcagttaattctaactcctcctcattttttgtcttttatttgtggttagtatgattatgaaagaaacacatgcatatagtaaaattcaagcagtgcagaagtcttttttcccctagtaaatactccgtgtctctctatagtttcaacaatatcttgcatatcattccaaaaagtttacaggaaaatgcatgcacacacacagacattgtgtgtatgcggacaaaaatctttttctttcaaatgtgtacctatatattcacttatttgatttatttttgtagtaatattttggatatctttctctatgtagctaattcttttaaatatttatttaattaactaaacatacctgtctccatccactaactgcccccccatgaagtacaaccaatgtttttattgtgtatcatctctctaaatatatgatatgcatgtagaagcaaatgcatatatgttgtttctcttttttacattagtatagactgagtataccattctgcagtttgcttttttccagttaaccatttgtcttgctgatcattccatatccacatgtagagaacctcctcattctttatcaattattgtatagaattccactgaatggatataccataatttgtttaaaggtttccctattattaaacatttgggttgcttttatttttatttcttttttgctattgcaaacaatgccaaatcaataactgtacatggagcaaaagggcatatgcatttataactatttcaggttctgccaattttccatggctgtgctaaccaaccatggaactatatatggaactatatgctgagagcagcatatagaagtccctatttccccactcttacacaccagcatggtgtgtaactaagtagtgtcttggagtattttaaatttttttttatagtaagagtgaggttaagcatttcttttcatgtagttaaggatcatgtgtaatttttttttattctttaaattgtcattgaagtgcattttttccccctgtggcttgctgacataaaatgacttacccatggtcacatatctagttagctaccgaggcaggactagaattcagctatcgtggttattaatttggtaatttaatatttcttactgtagtacattaagaataatacgttatcatttgaatcctcccaaccttgggttattgttaggatcatatgaaataagttagaatgtgaaacaacattttcaaaattaaaaagagacctgcagaatgtatgatgatggttcatttaattttacaaagaaatcacaagatttaccactttgaaaatatgcagttcataatgaaaacagaataaatagtttgacctggctgcagtctgagagaggtaaggcaattaggttgttatgagccttctggacaagcagagtcctgattttactagcttcgtgctgacatgtatgccttgttttttttccttccctaaagaatggaaaacattgtaccttcacagagtgatggcagtcttgcttcgcttaaaacttcatcaccctctgcatgagcaatttgccttgttcttttaaaagtggggggaggtggaggcagatcatatttgcagtttttttctattagatgtttcaaaataggtggattaaatgaaatttgttcatctgtgtgttattgtttatcagagaaaaattcagaacttttcgataattggctttcattgttttcaccagtgttgactctagatagcacagaggtgtatgcagatatttccttggttactttatcgtgccatgtcgttatgtaaaatcacttcaaggcatttacttttatttatatttcatattggctgggcaaactgtctattaattttgtgtgcacatagcttaaagacattagcccatacacagtaatggctggcctaacttgcatgtacaaaagtggaatttaggagattaacttgcatttgacctacttcagctctcctggtaatgaggggtgcaggagcacagaattaatctctctcaatttgtggctctcaggggtgctgctaagttttagagtgcttgaattttaaaagtctcctgttgtgctgaggagtttttgctacccagtagaactctattgactattgtgattgaagtactggttttatctattgcagcaatatttgtggcaaatattatgaacgcacataaagtgagttaactgtattgtttggctcagacagtaaaatgggaaaaacttgggtcaaacctgtggagccatgatgtctttttttttcttcctatccctggaagtcttaggttagccaaaaatgcataagctttaaactgctttacaaatacgccagaagctgtcttttatcgtatatttgttatgcaatactgaggtactgctgctgggaaggtataagtcaagttgatataatttggattgattagcttttaaaagctttgaaatgacagtgcaattattgctatgatgcaggtcccttacagctggattaatgcatttagtgaacaatttggccatgtaatttatttctgtggagttcacattaactgttaaatgcatttattccccaacagtcgtattaatactgtgataatgtgcagcagtagtagcagggataaactctaagaacttctcagtcccagtttagtttcaaattctcccttcatttccactaatttttatcatgtagcagatcagtagcaaactatgtgatgtctcttacctcttcctcttcctctggctgtcctttaatacaggtgaagggatcaaaggttgacaggaagcctatggaccagaaatcaaagatctggttgcccccatatctgcataattgctcctcaaatttcagacagtggccttggccgttcactatgcagtggtttttgttttagaaacctcattctgactaaactcatagattatgctgagtggatcatgcttagtcagtagtttcagatgataatgattgcataactataaaaggttcctttgagagatcatcctgtttaacccttcattttactgatgaggcaagtgggtcccagagaggctcaaggtcatttgctagttggtggcaaaacaaagcctagaattcaggcttcttgacactcagggctttcactgggactcctctctgtagaatatttaaggttaccccatttacatctcttcttatttgtcccgcttgagcactttatactctttttagaaatgtgagaaacacactgtagttgatgtagtttttttcaaaatatagagaaggtttacatttagctctatctgggaaacattctgagagattttctataaataacccctcactatattacaacttccaggacactatgcctaaagtgataattttacacaaaaaacacatatatgtcatttacatgatatagacacacatccatacacacgcagtatagtattccaacttatgttcctttaaaaagtaaatggctacgaagctaccaaaatgtagtattttccttttattcattacaaagatcaatcttttattttttatcccaaaggaaaatactaatatttataatatttatcaaaatgcaatgagattttatattatttccaacaattttaagaactcgccaattttatgtcttcaggttagaaaaataagttattttgtattagaaaagcaatactttgagtctcctttggtaagtttaaagcaaaagtttgttggcattttgaatgtcaacaatgtttaataatttcaaggatggtactgcaaaatgtttgactaatttaagtatgttccaaccataagcattttatctccttaacatgtcaggttggtcccttaaaaagatttattgaaattaatatgttctgtagagttgagcgccagtgtatatttttacatatggagaagtaaatttaaaattgtacagtacataaaaggttttgaaaacagttataaagacttatttaggcagtgatttaaatttaaattaacagcaacactgacaattttctatttgtttagctattaacgaagctatttaacaaaatgttttgtagactccagttcttagactttttttcttttttaaaaaaatacaacattcctttttgattctggcgagtcaggaggaattcctactctgaagacagagccagagtacagagttaatgtgcagcagtggccttcttccttggaccctaagatgctggagccactcactgcacttttcaagcagctgccaacattgtcagcactgatctgtcagtaaggatttctcctggcaaaactctgaagctactttctgacatcttcaacaaactaattgttgtctcctgcctctgcgagccctctgaagtcccaacgagttagtgtcttctcaagagatgagaaaaaggactcacaaaatcaacttatcaggctattacgcattgtcatcagccaaaacaaaaacctgctaaagacaggagaaaaagtagaagaaatgggtctctgagaaaaggttacagaacatccatcttctctcctcttctgattgtttcctttctttgcccattttcatacccgtttccctctgttaaaagacactttatgacaagcattgtaatctctttagaacggaggggaacctcttctttaggacacaatctttgcaagttgtgagtgacagtgggaaagggtccaattgccactgaggacaccaggcaataaatcatcctcccctggcatcagctggctggacgaatccccacttcctgagtaagtaccagggcctagatgtgacaaaacagctattgtcagctcctagtggccacattcccactttctctctactgagattttccgtttactcgagacttttagtagtgcaaaccatattgggaagaaatattcaaataactaccattagaaagtgaaatatctgagagttggataattataatattcatctaagagcaacaattattagaggaaaccttctgttttcattttacatatcatcaagcagttgctttatcaccattaaaagtggcatgtcttttcattttttaaatgtttgatatatagagtagttctcaaaatgactttataagagcaatgtgcaaaagatcaggtaaaaattttataaataatatgaaaagatagattgctgtagtgataattttataatttggtagagttagggcattttcaaatagacacttttctttgcagtgattaagtttagatatactattattattaatatgcttgtaaaatactgtaaggggtaagctgagttccagttatttcatgtgtagttaaaaaccattcaaaaatcccaaatataacagatattttatatataaataaaattcatacaaaattattccaaatttaggaaataaaatttttaccataagtataaattatacatatttcattataaacttggttaattgctgaatatgtaatatatgacagcataagtactgaaatctgagatttttaaatagtcttataactaagataatttaaaaattatcttgaaaagtatatacagaacatacttatacctattgagaacatgctattttgagtggtgaaaactttcttgtgttttgagaacttattaaaaaatcattttattttaaattgttgtgggtgcatagtgggtgtatatatgtatggggtacatgagatgttttgatacagtcatacaatgtgaaataagcacatcatggagaatggggtgtccatccctgaagcatttatcctttaagttacagacaatccaattacactcttttattttaaaatctataattaagttattgttcattatagacaccttgttgtgctatcaaacagtaggttttattcatttgttctttttttttttttgagagggagtctcactctgtcactcaggctggagtgcagtggtgcgatactggctcactgcaacctccgcctcccaggttcaagcgattctcctgcttcagcctcctgagtagctgggactacaggcatgcgccaccaagcccagctaatttttgtatttttagtagagatggagtttcgccttgttggccaggatggtctcgatttcttgacctcatgatcctcccacctcggcctcccaaagtgttgggcttacagacgtgagccaccgcgctcggccccttctgtgtttttttttttttttttttgaacctattaaccctctccacctcccccgccaacctccccactacccttgccggcctctactctctaagtccatgagttcaattgttttgatttttagatcccacaaataagtgagaacatgtgatgtttgtctttctgtgcctggcttatttcacttaacataatgacctccagttccatccatgttgttgcaacatagatcttacattttttagcataatttttctcaaagaaaaagaatgacttagtagagattatttaaataacaaattggtaaaatctattaaaagtgggactttaagattgtattagaaaaatcctttgtttacataatgcttaaaattcctgaacaagtataaaatacagtctatcaccctggtctagttcataaacatttttgataacttaccatgtctgtctaatgttcagaatgcttcaaatatttgtcattatattgacaaaatatctggataattgacagattttttaatgttccacctgcttgtctcatgtagacacagctcatatctatttccctctgcaaaaatatattcttgtccaacttacctgtcaggctcttttatgattatgaagaataccttgcaagaagctgatggattccctttttatcccctaaatcatcttgagctgtcacattggagctgacacactttcattatcataaatacacacaatacacctctttacaatttagtaacaaatggctaaatgtatttttaaaacattttaattgtgtagaaagctatatctggtgcatgtttttctttttcatgttgtaaaatccagtgattaactgccatcttttaatattggtgcggtgatgatcataatatcaaaagcattctggcattatgaattcatagtcaaatggtgacaccaaccagatgagatgatggtgtaccaggctcgatgacagttctatctcagtttatcatcttaactaaaaaataatcctatctaacttgaaatccacagcagctataagtagaaaataaatccaaaccacagctcagacttgtaacctaacagctatcataaataatcagagcctatttgaaggtggaagatgggacattagaagctatttacactactagagtgatgccatcgatcagtagcggcaacccgtagataaggctcctatgatgtcatggttatttatgatgggcattgacagtaaagctactacggaattttctcctcagacagcttcattcatttttgtttgtgatgcattttgttattaaagaagcaatcaatagcaaaaatcgtggtgataaaagtattacttgttaaatatgtgaaaaatgtgcatgtatgtaagaatgtgggacaaaagatgaagaatttaaaaattcactggcagtgtttacgtgttccagctacaaatacataatagattcatttcacatgtcttgggctttcaaatgtggcccacttgttcttcctcttacatcctattctcttgttagaaagcagagttaaaatgttgtggtgccctcccacttccccccacatcatatatttgactcactttagacaatataaaatttaattagagaaatcacatgtgataaagacaaacacccattactttgtacataacccatctatatgagagcaaatttggtgatttcagtttagtttttttttaaatgtcattttttacttgttttgtttccccccatcctgtagctcatcttctattactgaaaatattcactagaccagtgcttctcataccttaatatacacacacatcagctgggaatcttgttaaaatgcagtttctgtcgcagtagttccgggaagggcctgaaatccaacatttctgataagcacccaggtgactcaatgacagtccagggatgctggtccagggatcacacttttagcagcaagacactaggtaaggtggttatttccatacattgcagtcttcccttcaaatcatttgcctgtatttaaaatggatgtttttctcattggtgtagagcagtggttctcaaactttagctgtagagagccatttggagtggttgtttaaacagatgtctgtgccccatccccgagtttctgattcaataagtctggggtgagcccaagaatttgcacttctaaaaagttcccaaatgaccacatttttgaaaacccctggtgtggagtcctaatttaacattcacatgacacttgaagcccttatgtaatgctggcaaggtggtaagttataagacagataataaaacaggggaggggaattaacatttgttgaatgcgtactgtgttttaggcattgtagatgctaacgacctacattatttcatttgtcttacctaattaccttaatttattcaatattgattttggttctactctatataatattttctggaaatcattggaaaaatggcctaaattctcatagtgccataaaaacaaaattcttgccctgttttctatgtggttccaaatttttactctgagaatgtaaaaacatagctttttttccccaagcccccttttcctatcactctcttcctcccgatctgctaagacactatgagtaacgataaacagcaaagacaaaaaataacataatctctaccttctaggggtttatagtctaatgaaggaggcaggaattctacaagattgtgtgtagtataacagcagaatgaaattcttgtgaagaagtgcaaccttgcatagaggaatgagatccatttctcaccctctctccctttactctccttttcttgcagcttctatgcttcccaacacacacacacacacacacacacacacacacccctaacataaatacatttcctaaatacctataattcagaaaaaagtgttatctatagaaaggtttctttggcctaaattactccagttttctgatagccccagttcacaccatttcaattcagtgggtttctgtgaggtgcctaccattccagatatttggggcacagtggggaccaagacacagccccagctctccagagttgacagtctagggcagggagacctacaagcaaacaggcagttacgatacagggtgataattattacactctgtaaggcggaggtgctatgagacctagctcagtttattaggcatccggggaaacttcttggagaagtgaaatctcagctggtgcctgaagaatgagtagaagttcaagggaggggaggtaggaactgaggagggccaggttcctggcagttgaaacagcttgtttaagagcctccgatcctgagggagtctataaggctgtagatgatcaagtagttcagtgtagctaagcacaaacaccctctgattatatcgcaaccaaataagtgctatgctttaaacatgtgttttgtgaatatgcagcacttatgaattctcttgtattcttgataaagggaataggcttttgaaaacctatttttctttggtaaacagtattgaaaattagtcacaaaggacagataggctatcactcagggttggttgctgatatcatctttattttcctgtaatggctgagtatagattatattaaacattagtcaccatgtgaaaaatacactttgacacacagacacatcttttcacatctatttgtgtagaaggctggaggtcaagcagggggcaatgtcatgttttaacaatgcccttttataaggattcagttccaggaacacttcttgggcatcttctgagtacacagtatttggctcgggcttcagagttttgagggcttctagaagacagggactttgtccatgaagcatgtgtacattcctggtttcaaggcaaggcatacacaggtaaacagcaactggaaactcattcccaggcaacaatgaccccctaggggtttgtatcagggccatcagttatttttttttcttattacagtgacattttgagttaaaaagatggaggttggtattaataacagcaaatgtgttcttgaaactgacaaaaggatgcgtgtcgggaatcaataaattgaaatctcttccaagcttatgcttttgaaccacaggtctgagaggtctcattctagtgtaaatcacagagagtcattcagatgtatgaatgtagaaatgtcctacagtagcaaggaaatcttactaattttccttcttgcctaaaaaaatttatatattgtatacagagattaaatgttaacaatggtggtgttctttctctctccctacccaacccttaggtctataatttaacttattggctaactaaaataacttctaaattaagcagtgatttcacataagtagttattttccatagatgataaatcttattcatggacgcaatcatacatgaagacagaatcacttcctatttcattaaaatttacatataaaacttaactactttgtctttttaaaaaatagttattctagtcacttgcagagtatcttgcattgaatttctctcggaaaaaatatctaaagttactgagatgtttctatcaaatattacactgtggtaatgttcatcaagccttttatggatccttgatttttacataaaggtagtatctctgaaacaaaatgctgttactttttagtccttttcattgaattcatttattctagtggtaatgcttgattatttccaagagcattgtcaagcttttaataataaatattggagttaatttaaatgagtcaaagttcattctcatttagcagccatctatttaagtaatttacctgcccagtcattcccttctgtgtagcaataaacggaaatggctggaaacccatcacaaaacttttaaggaagaaatacagtgttttaatggagaatccttttaaaagcatgagacaaatggcctggaattgatgcatattaaacatgtattttatttcaagcactgataagtgaattatattgagtttcttcagatttaacattatcctcagtaaaaaaaaaatagtgtaacttttaatgttttcattgcaatgctttacaatattaaattttttttcctgtaggccatgaggtagtcctttgtggtgagcttttatttgatgagagagaaacattgtgtttattaatatttctcactttttacaggaggctctgcttctatgacttcatttggccccccagaagctccctagattgtactcaggaaatgttattacaagactttgtgtcatattttttgaaaagatggtttcctgtgacttacatagaatagtgtatgatttcactggaattttaacatttctgcaaaaagagtaaagagtccaagtgggccacaattactattttatataaaatgatattagaaacagtaacaccaaagatgaatccagaaagccattttgatatctaacaaaaccaaacgctaaaaaatcgcaaattctctaaaacatagtttgcataaagtctgccattgccttattcctctaaaataattaagtaatatataatgtataggaacaccaaaactaatttttctgtttctaaatgtattaagataatatgaaatcatagtttagtaaaatggatttctttgttttataaattcattatatacatatattaaatgcaatcataataatgaatcaaatgcaagcatgaattacccataaaactgactgttaaacttttcttccaaatcattttacatgattttgagttaaaacaaataaaagaaacataaataatgaatacatattataacacagtgtaacaaaaattgaggtgtttcaactattttaagtcctatcaactgtggggttctgaagtcatcttttactgtgtgaatctcagttatatatttacatacttatattgaggattgcacttatggaatattcaaatgtcttctctgctttccctggaacaaactttgcccatttcgtaaaagttcttccccaaccttccaagcgcacgctgagctcacctcaatttttgacatgctgaaggagagccatagagggacagaattgtattctgtttcaggaaaaggactgaggaagattatcatgagctgaaggaaaatagcacagagaatacagaaaatgccttctttcctagttcaaaattaaatcagtcttcatcatcacaaatgctgagctctcagcaaatagttccaaacttcttactagtgcaatttatttgaaggctgtttttgctctgttgttttcatatggcttgtctgatgtgtgtgagtagttttgtctcatagccaacttctgcttccttgttcagtccagtggtgagcagagctcaacattcatagtgaaaaatagaatgatagccacctaagcataggaatgacaaacccctgaaaaaaatgaactgcgttttgtataaaccagtgggggccatttctttcttatttgccacaggccagcagaactggagcccttttagaattgtaacactatttttcctcttttgaactctctgttacctctattgagggagtgcagatatgcaagggaagtctaaataggtaactatgtaattaaattccaaagatagaccccatgatggtttcacctgtcttatctgaagaattgcatcttttccattacatggctcattttctccttagactccacctttggtgggccactggctccaaagggatacatgtgattatttatttgccactgtaaaatggcaattatttatttgctattttcttctttttcctgattaattcaacaaacaagttttgaaaatcacagatgagttggaaatatttgattgtcttcccagtgtacttattatacaggatcagcatcctctctgacctcaactatttctctctcgcaatgaatgaccttctcctcatcaaccagcgttctccgtcttctgtggttcttgcaggttggaatcacctgaggagttttaaaacttctgatccccaaggcccatcctgaacaatcaaattaaaatctatgagaacaggatccatttatcagaactttataaagctttcctggtgattctaactttgagaaccatgtttatagatggaatgagctaataatgtccggtgcttcaccgtattttgcatatgtgttaatttgaacccaattagcacatcaacaaagataaaattattaactgcattgcctctttctgtacaatttccttttgagcagcagaattgattccagaacaatgatattggtgtttaaaggaggaaaatacaaatgagtagctaaaaatagttatgcaaattgactggatatattagggttaataaaaccaataactaactctttacagatttaatcctatgagaaagcagaagagagccagcaaaatttgcacattccattctagaaagttttttatttatttttttttaagaaagtgttattaaaagaaagaaaacactcagaaggaaggtctagagagatgcctcaaaaagagtaaacagaattgctaccgtctgggtttgctcttatgctttaaagacaaagaaagaaggaaggaagggagggagggagggaggaaggaaggaaggaaggagagaaggaaggaaggaaagaaggaaggaaggcggggaggtagggagggcaggaagaaaagacaaaaaagtagtgaaaagaaaagaagtggaaagcacagttgttatgtagaactcctttttcctaagcagcacaaaaatgatttgttttcatatttgtttgttttatattgattttgggttttctttacctgcaacaatgattgctaaaacattatattatcataatataaaacaagttaaaaaattaaaatttgtatttacttgtaatacaaataatgtgaaaatagcatatctgaaacttttattcggcaaataatttgcttttcattgcttagggtagtggtgttggtgtttagttttgggatccagccttgaaaataagaagagatcaaattggggagggatgtcaaccaagcaactggccaaacgaaaattcccccatctccctaatgtttattgtgggtaattactatgtctccatccttttatttattctatattttatttaattcctaaaatacagtggctattttctccttctcgctggcttggccaatcacagctatttgcagctttgacatggtgcagttgatggggttaacaggtcacccctctgtatctcttgtccctccacacccctccccatcatgtctaacttcctcaaaactttctctttttttggcttcagccaatcctgatgaatagttgatgctagatgtgctttattataaacatgtataatttgtaggcagacctttatattcttctgaacatgtttggtggtcagacataaaggaaaaggatattattaatttaaatttcataaagtgaaatgctatgtttttgttagaatatcatatttttctagaaaactttcttttgttaaaaagtattttttcttcaatgctgtgcttttttttcttccctagttgtttgaattataatggcattccttactaaatttttccactgtcactccatgcatgggttagcatagacttggttaatttgttttgccagtgaaattaacttaccactaagtactgaatctgaattatttaagacaaaatatcattaaagtataggaaaccaataaatgcactgatgaataagcattgtttactgtgtgtatgtgacatttcacaaatgtaaaatgtctattcagatttttatcattttttgaaatgctaaacatgaatgcaaattcacatgaaatgtcccatatggtacagatgcatctgtaagatatgggtatctgtgtatatatgagtatgtagtaaagtcgattgtattttgcccttatattgtgtaaaccatgtacgtaccaagacaattttatacatgttatatcccttcctcttgcatgctcattaatcactgagcactaataacacatttttttgtcttggtacaacaaatattctggctctgactctcgttctggctcatttacattggcctgcctgtcagttcaaagcttcagggaattaatattacaagattaaaaagtgaagtcccttaaacatcccatcttataaacttgtggttagttttgcagggagaaaaaaaaaataagccttcgaagggcaaggactttcaactttcttggccaagatttcccctttccttcttccctccttttccctgaataatgaaagccccagactctctaggacaaggtcctacctatgtcctagtaatgtgactttcttaagagtttccccctgagggatatgtggttaaactgtgatgagcttctgcagtattttggatgccacttccctttagtttgcctttgatttgcactttttatctattttaggataagagtctgtagaaacacctcaataatccttttttttttttttttttaaataaaaaagaaacattttccacagccatctggtttctatgtaaatgtatgcagtgactctggagccatccaaatcccagtacgcatctcacttgctcactgactcttttttggagaatcagaagaagaatcaaaagcctctttgaggattacagaaaaggaattccacatgtgttagtgtgtgcatgtataggcaatttattttagagaaaagctccactaaaatcaaatgaatataatctaaacatgcttttaaaagattaaaataaaaagagagatgtatctggaaagccctttgaatttttatagtagggtcaatttatgtggttcatcctatgtattttgagatcaatcttcagtgggacttacaataaatgatgtgtttaagatttctatagtcttccagtgtgttatgacacttatgaaactataagaaacactcacagtaagctattcctgccttctattatcattctactgtaagttatttctgtagatatattgttttcaagtttttattatataaatcctctttattgctttttcatggggatgataattaacacttttatggctgttgtgtattacaagtatctttatatataacattagagttcatattcaaaaccactgtattaggtaggtatggttcccagtctttaggtgagaaaaaactaggttcagagagtcaaaacccagacaatcagtaagtggtaaagttgggagcttaaagtaacaatatatttagattgccttttctctttattaactgtatggccaatgacaatttgtttgacttttgtaagcctcagttttctcatttgcaaaatgagattaatatctatatcttggtggtagtggtataaggattaaatgtaatgtatagttaggatgtttgtacagtgtctagaacataataaacagggtggggtagtagttattatcattgatagtattattagaggcagaagtagtcacatttgtggtggcataataatcaacatcattatctaaaatttacctatactttagctgtaaatatataggtaattgaacactacaattgtcatttatagctctataacttacatatatatttctatatatagacaaatatgtatttatataaatttagggtctgtgcataagaggataaaatgaaagctttattatcgaagttcagtaaaatgtctttttataatggaagatattacttaaatgaaaatgtcacttattttggtaatatgaaatttcttttctacagattacatttatttttttttggaaaaaggtcaaaatcaagaggaaaaatatggattgctctaggcgtttataaaaaaacacaagaaaacttattttgcttaaccatttcagatgtccatgcaaatttccacagaatcggatgttggaagagatgaggctataatctatcatcagtttattaagattgttatttgctcttttttaatcttttagacacagactgatggaaatattatatttaataattttttttctgtgaattctactgtggaactcagtcacaagtttgaactagatgtcattatgttttcaaataatagttatctgagctccaagcagattctttcctctacttgcaaagactttccctcttctttgtccagttaattcctaatcacccttaaaaattccacctgtaggctgggtgtggtggcttatgcctgaaatcccagcacttagggaggccaaggttggagaatctcttgagcctaggagttccagaccagcccaggcaacatagtgagaccccatctctacaaatttaaaaaattagctggtcgtggtggcagatacctgcagtctcagctattcgggaggctgaggtgggaggatcacttaagcctgggaggtcaaggctacagagagctgcgttcataccactgtactccagcctgtgcaacagagagaaaccccacctaaaaaaaaataaaaatccacctacccatcccctttttaagaaagtcttcttgactcttgaaatagatttagatatttcttttgctgacacacaaaacactttgtggatacttctatcatggcccttgccatgctgcatggtaatctgcttacttctctaccccctcacttggttcttataggtcgacacactttcttagtcagctttaaatgctcattggcatattgtacataatttaaaatgctcatgggatgagtgggcagcagcgctttaacagtttcccctgtatccagaatttttgcagaattcaaatctaaaataattttctcttaaaaatattgcaatggaactcctctttgtcacccatttatataaggaaatactggggcagggtaggttataaaattcaactttactatgaacaagaactggctcaggaggcaatataaactggacagagcgagttagatggcttcattcagtgggattccaacagctctccagaattaagaattaagggcacgtcttagtgccttagaaaaggatgctcaatggttcacttttgcacacagacaaacaggcacttgcttgcccacactccccacatagttttgaaggtaacaatgtcccaagcattttgagacttcttctttggttaatggacaaaacagcttccgaaatagaagcattataggaaaattctaatcttgatctaactcagcaattgaatatagcttaaagcttatagcataatttctgggccacctgatagactgacttcaattattttttgaatcattagaatgtagcattgtaattaattttttttcacaaatcaagtgtaataagatgaatctctaattttaaaaaaagttaatgtttcccaaggctaaaaaagagaaatgtgtttgttttcaaagataatctatgtgcatattcatcagtatgtttctatattgatgttaaataacatttctttacttcggaatgggtagcatcaccagagaggattctgtgtaaaactcaggatactaggtaaggagctaacaatatctaccagtaggttccgtacagtattttgaacagtaaaggatcttcttctaaagtcaggtactcagatgtaaatagcctcaagtctcgtgttttatattaacatggttagataatgtattccatgaaatattttagaagctctgacaatcatgtctccaggtgtcaagtacaacaattctctatcttataagcgaacaggaggttgaccttgttttcccatacaactgaagttgggagcgaggccctgtagtcctaacattttcatttagtaggtggacattactgaaaaaaagctactagacactagtagaaaaagctgcatcagctttttctacaacatttaattcatattgcattcagtgatccaataatttttgttcctgcacactatacattcatagacattggttaaatgcctatcaaatttaagtatattttaacaaactaatagcttccttttccataatagaatgttttaaaacactcacatggtgcagaataatttagttcagttatatgatgacaagactaaacaaactttctctggagttctgggtttttcatttcgttactttgcactgagcaagcaaatagagatgagctatgaaattttaggactttgccttgaaacacgatctagttgacttataaaatctgagatgttgacaaaatgtgcagtcaatatccaaataaatgcagttacttcattttatgtcaacggagaaggtgaaaagtgcaacttaactggcttggtaagattggaaggaggggctgggaacatacaagagacaacaaagagatagttggtaagatttagtggcttgcttcatcaggggtggtgagaagccagtgtgacaaagttcagtcgggtcaaacaaagtgcagaaacttcctcatagacactgaaaggagggtgtagcatggaaacaaaatgctcaaatgttgtaatcttgagacagctaaaatgatagtcgatgtgctgtttctgtctaatcctgctgttccttttgattcaggaagtagagaaatcaccttatctctcatgtaccagtatgatataattaaaataggacatgcttttgaagtgaagtatttaagggcttcaaagaaggtgtggagtgttataggatcagcatatgtctccttctcaaaggcagttatgaggacacatttatttaacaaagacatccttttgaaagaggaactgcctcagtaatgatagagtgtgtatgtaatgtctatcgaattatatacattgccaaagatatatgcagtttactctctgacctagatcttggcaaaaagacaggtcaatgtttttatgcttttttttcttttttttttttttttttgagacacagtctcactctgcgtcaccattgctggagtgcaatggtgtggtcttggctcactgcaacctctgcctcctggcttcaagcaattctcccgcctcagcctcccgagtgactgagactacaggcatgtgccaccatacccggctaatttttgtatttttagtacagacggggtttctctatgttggccaggctggtctcgaactcctcaccttgtgatctgcccaccttggcctcccaaagtgttgggattacaggcgtgagccaccgtgcccagccagctaatttttaatttttattttttaacttctgtaagaaaatatcatccatttggctaaaagatacataattttcattatgttcccaaatcaacctatactaccatatgtacattaccataaattcatggtaatatacatgaccataaatgcaaacaactaaataatttttgttttgcaaggtagagcatttgtttcagatgagctgatgtctatgattttgcatatgtggctatttggcaagccttttgcatctgaccctatagttgaccttggaattggcttactttaaccatgatggatgtaccaaaagatttatttttgtcatctaagagttgagtcctaggctattgggagcataaagctgtttattgaaagtaggcttggcaaacctttgctttcaaataatcttccagaagctcatctaattttgctaattagaaggagataaaatatacccacattgtcctttacaatgacttgaaccctctgcccttccttgatgataatagtattaaacatatgtgtacttattgcattgaatattaattaacacgaactgaaaagagagaattttgttacacacccaaacatattcatgaaattaatatttaatttcacacaagtactttactgtccgtttgaaggtggtaaaaatagcaaaggcaacatgatttttaacttgctgatctacaaaaaaatgtttaaatagactccgattattgaagcctgattttaataaataattcaagaatgaaagaacggtcatttctgtgggaagcaaaaggagaccattcaactagtactgaccttgtcactgaaaattaagttctttctctgaatccaaaaatcaaagcttaaaaggccactctctctataatatttcattaactttttgaaatgaaatacctattgattaggttttctttcagataataaattctacatgtctaatctgtcacttcaattacagtatttacttgtacacaaggaaaatgtttttacatgtgaaattaatagacttttccaaataacatactgtaagggttcaggtggcataatttttcgtttctttgaatagaatatccagagtgcatccatcttttctcttctaatgttttgcctgtgttgttttctgcctagaaggctctcctctctctctgtcccctggatccttaacaagatcctagttatctccaaagcctagttcaactgttgcctccaccgagaggcttccttgagctttttttctaaacagaataatccctcctctttctctgtgttccacagccctgttgacacacaccattggtgtggcccttattgtgccatgttatctctgccctaggctggcttctaagccttttatggctcatctttttcatattgctatgtctagtgcctagcccagtggcaggcacacagggttgttgaatttagtgctacacattatggaagctgaaatgtttgttttgaccctttggtttgtatttcttcttcgtagaaatcaacgcaacttcatggatctttatcttttaatagtttacatgaagtatctcacatctggcaactatcacccccgacccaatcataaataacattcaaagttatttaacttcctttattaaaggggagctgaaaggagcagcagactttgttggccaacttctagaaaggaaataaaggccattcagacgtcagaagattgtatatgttagttgatacagtgcattcagtgttcttaaaggatcaaacaccaagttagtattgaactcaattttccatcttcttcaacagtgtctaagttaagaatcaaagtttgttggtgttaagatgctttaaagtagaatgtcttggggcttcacatacccttcagacacatttatcctaagctaaatttaccctttatgaaggggacaacttgaactatttaatgcaccttaaaaagtggtggtgagaggtagatacttttcagttgttatgtcatggcctttattcagtatttctgaatcctcttacagatagaaacacttgcaaacattcatcgggaatttggctagcagaatagtaacccaccagccaaagcccacctcatccagtttccagtggttggttgctagaaagatattccagtgactgtccgaaagcaaaaacaagcggacccgtagctgtgctcctgttctgtgaatggtgtgctccgcagtgtccacctcggggtgcttctgtgcacctctgggcccaaagctcagtgaaaacttttcactattcataagggggttctcaaacccatggtaggttagacttcaagatctggttttgatcatcctagatttagtactctgctgcctggaaaatatgagctgtgagtagtgtgaagagctgttactgtaggacccacagtttgcaaggtaacttcaatctgtaccaggtgtgatttgattttgctgagatgagggagttggcagagaagggaggggggtggtagggaagaggctgtggaaataccctcagtaaaaagtacccagagttgaatcttctagctgtcagaacaagttcttcctggcaaactgcgttaacggcattagccccagcccactgtcctcagtctcttcctgcacttgtaggaggaaagttggttctaagtttctgttatgctcagtaatgagacagaataaggtgacacggaagacagtgaaccagaggagggagaatccgaggatctgcaccgagtccctttcttctagtcattagctgggactttggcacgttgccgaaattctcagaaggtcagtttgttcctttgtcaaataataattaaatcttccctctacccagagagtttcctaaatgaacttttgaaagatattgtctataaaaatatttcaagacctgtaaaaaatgtttttgacaagacagatgtgaaagtatgcagcagagcatgtgtgtttgaaatcctccagccatgaagatgattttcttaaaggagaagtgtgtatctcccgttctcatactctgactatccctatacttctgacaacttctaggcgttggtttctgtgaacacaccttggtcactacacgagagtgtgcttggtttcctcatcagtaaactggggacaataatacccacctcccagggttatcgtgaggatgaaacaaagcaacctgtgtgagcacagagcactataggagttcgctgaatgttagttcctcactctttcctctccacccccatgcccctactctggtgaaataaaatccttcttgtataactcaggaagccccaggaacacattcctgcaagccatggaggaaagaaatacttccctgtgtccttttggagagagctgggcttcggctgggctgatgtcatagctatgctcctggctgccttttagtcagaagagatgttagtgtgctgaaaaatagccaaggaggcttttttcctctgcatgggaaagaagacatttttgtccatcctccaagtcttccttgcacagattactgtcaaacccaagcactttatttataaaaatgccaacatactctgattatttggcgaataaccatgctgctgtcagtgtacaaacagcacatagagtataaaaacaatctccatttttatcatggctgtcacagctgggaggctgtggaacaaggatgcattgtttgagggaagggctgtagaggcaacattcaggtcctttggtggcctcctgggcagaaagactgtggtcacatttggtaaactgttacatgttcttttactgaaaaacattaggcttgccataaattagtttctgggttcaatattgagatcttgacatactgttgcttttagataagcattccctggcctgcctgtctgtctgcctctctcttctctaattcataggccgtccaaatgcctacgtgcttccatggaacaggaagacagacccagtggctgtgcaaccaaaggaaatccatcattcactgatgaatttctaatgacttcatattttactaccacatggaactcccaaataaagcctctagaagggaaacacacacccaatactgggggaaggaggggtaaagaagtgatggccctttactcagcactggtttctgacctcctcaagctggttccttctgggtcaaggtagatcctagggaggataactctcctggtttcagtaacagttgtgaagcatatgtgtgagtgcatatgatgactctgcatgtctaaggtctaacagattggtcccaggatattacatgttttccctggaaaaccatttctttttttcctaaaatgtgtttcatcattgtatgagctgttgctgctgctttttttttttttttttttttttttttttaccggagtcttgctctgtcatgcaggctggagtgtagtggtgcaatctcagctcactgcaaactctgccccccccgggttcaagtgattctcctgcctcagcctcccacgtagctgggattacaggtgtatgccaacatggctggctaatttttgtatttttattagagatggggttttgccatgttggccaggctggtcttgaactcctgacctcaggtgatatgcctgactcggcctcccaaagttctgggattacaggcatgagccactgtggccggccttttatgagcttctcagtggatgaattggtatcatttacctttagtaggtactcattggcatttgctgtctttataattttttttttctttttacagtggtgaacactccaggaagaattaactgtatagtccttcactcctcaaagaggaaactttattaagttgttcagttggttccatcctgataagtcttggtcaggcttgggaaaaaagttttcatgtgatttttaatgaaggagttctttacacctatagcctattgagagactagtgagctgccaaggaggtcaatgagtatggagaataaagcggtatacaaaagacaaagccctagagcctctttgtgaatgaataaaataaaattgggtgttagcccttgcacctaattcccaatctggccaaataggtgttatctttatacctctattggcaggttccatcacatctcaaataaagaaaataaagaagaaaaatatttgggtctagataacatcgtggggttagaaatactctcagtaccacctaagaggaaacacacacgagattcagttaattttcatgctaaatccaagtgtcatatcacaccaccagaaattcaagtaacttcttatagttcagaaataaatgatggtgttgacaaggggtgccacatgtgaagaaaccaatattattttgtaagattatgtaagcaaagctggagatacatggagaaactgtgtgtcctttaataatcccagctctggaaggacagcctcagaaactggaaaaaaaatcacttcggtggctccctgtgttcttcagaaagaaatccagtttcattagtttgatatttaattaggacagcaaccatgagtagtgtctttcctctttcctttccaaaaatgtctcttccactgtcttttctagtgccatgtctcatgttttggtaaaactaattgaaccttgtatctgtactgctgttcatgtttgacctcctcccttaagtgttaagcaagtcctccctgaccacgcttgtcccaccctccctccacaaaaccacataggtccacattccatctccctgaagagtcactgcccaactcttcaaggctttgtttagctaccttcttttctgagatacattttctgatcagattgaaccagttaaaccagatttaaactcttttttttttttgagacggagtctcgctctgtcacccaggctggagtgcagtgttgcaatctcagctcactgcaacctccaccttcccgggctcaagtgattctcctgcctcagcctcccaagtagctgtgagtaaaggcgcgtgccaccatgcccagctaattttgggatttatagtagagactgggtttcactgtgttagccaggatggtctcaatctccggacctcgtgatccacctgccttggcctcccaaagtgctgggattacaggagtgagccacctcacccggcccactctttgtattctaacagcacttttcctatccatttagcatttcacaatttacttttaatgtagtagtttatattttttgtccaataagttttacttcttgagcatagactgtacatccttccagtgtcttagatatgaatgttcatggaattatattagagtggtggccttcctatcctggcatggctgtacttaccaacaggaagcacaccagctttgaagcacagacccattgccaaatcccctcatggagaccctgggttattttctggtaagttattagcccctctgagcctcagatttctcatccagttactggcagttcatttataaaatatattctagcacagaacctagaaagtaatatatgctcacaaaagggcagctttttcctatcactccatcagaatttcttagcttatgtcttcctgtaataatgaagcaaaaacaaaaacacaatataacagttctctacagtgttgctcaaaatgtcaaaataaagatgtggccaataaaaaagaaagaaaatacagtttcatttcactgaattacaatattgactatgcttttcaaaatacacttgtcccctattgaaattctaggacgttttcttgaaaatattatgggttcttccactggtggaccatcccattcccttccttctttcctcttataccatgataatcagtgcactaaattgtaagctctctgaaaacaggggggtcattggctttagatctgtgactagaacctgggaaagggttagtctttaattaccgtttcctcctgaccaactatacctctactcagatccctctttatccttcctcctcagggaccttacgtcatcaatttttctttctctctgtatgtcttcaacatcactttgtatccttaggatcaccagactttctggctggcctcagacagtcccagtttattcctattgtgtcagcataagtagcatcctcttttaccctcaaaaacatctggtttggatgacatatgtttctcctaattatatctgaccttaacctttaaccatccaaaagctcaaattctcccatcctaaaaagacctaacaggcacatacattctaaaatccgcatccaatcccttatttttctctccttcccttcatcgtcacacgtcttaaaaggattgtctacatccatttctccatttctttatctactattatttctctagacaatcgtcttatctctactactcttctgaaattgctctgggcaaagtcaccgtacgacctcttgttaaatcctttgaacatgtgaaggggtctggttaggtgatttacaagctccttctccacctctaataagatgctatacatttgaaatatttcttgactctcatcttgttaaccaagacagttaactggttgaggttctatcacccatgtgtccacagtcatgttataccttatctcatttagttcacacaacaaccctctgaagtaggtatcatttccccactttacacatagggcagaagagagattgataactttcccactttctcacagctactgatgatggagctaagactctcatttccaaaataaactctgttatttttccattacacaattctctcttcttcccaaccgttaacatctgtttccatatgaccaattcattatagacactaaagagtggtgtgctgattttttttttattatactttaagttctaggatacatgtgcagaatgtgcaggtttacacatgccatggtggtttgctgcacccatcaacccgtcatctatattaggtatttctcctaatgttatccctcccctaccccccaccccctgacaggccccagtgtgtggtgttcccttccccatgtccatgtgttctcattgttcaactccctcttacgagtgagaacatgcagtgtttggttttctgttcctgtgttagtttgctgagaataatggtttccagtttcatccatgtccccgcaaaggacatgaactcatcctttttatggctgcatagtattgcatggtgtatatgtaccacattttctttatccagtcgatcactgatgggcatttgggttgtttccaagtgtttgctattgtgaatagtgctgcaataaacatacatgtgcatgtgtcttttttttttttttttagacagagtctcactctgtcacccaggctggagggcagtggtgcgatcttggctcactgcaacctctgcctcctaggttcaagggattctcctgcctcacctcccgagtagctgggattacaggcacccaccaccatgcccagctaatttttgtatttttaatagcgacgaggtttcaccatgttggccaggctggtctcgaactcctgacctcaggtgatccacctgcctaggcctctcaaagtgctgggattacagacatgagccattgtgcccagccctgcatgtgtctttatagtagaatgatttataatcctttgggtatatacccagtaatgggattgctgggtcaaatggtatttctggttttagatcctggaggaatcgccatactgtcttccacaatggttgaactaatttacactgccatcaacagtgtaaaagcattcctatttatccacatcctctccagcatctgtcgtttcctgacttcttaatgatcgccattctaactggcatgagatggtatctcattgtggttttgatttacatttccctaatgaccagtgatgttgagcttcttttaatatatttgttggtcacataaatgtcttcttttgagaagtgtctgttcatatccttcacccactttttgatggggttgtttgtttttttcttgtaaatttaagttccttgtagattctggatattagccctttgtcagatggatagtttgcaaaaattttctcccattctgtaggttgcctgttcactctgatggtagtttcttttgctgtgcagaagctctttagtttaattagatcctatttatgtatttcggcttttgtggccattgcttttggtgttttagtcatgaagtctttgcccatccctgtgtcctgaatggtattgcctaggctttcttctagggtttttatggttttaggtcttacatttaagtctttaatccatcttgagttaatctttgtgtaaggtgtaaggaaggagtccagtttgttttctacatgtggcttgccagttttcccagcaccatttattaaatagggaatccttccctattgcttgtttttgtcaggtttgtcaaagatcagatggttgtagctgtgtggcgttatttctgaggcccctgttctgttccattggtctacatatctgttttggtaccagtaccatgctgttttggttactgtagccttgtagtatagtttgaagccaggtagcatgatgcctccagctttgttctttttgcttaggattgtcttggctatacgggctcttttttgcttccacatgacatttaaagcattttcttctaattctgtgaagaaagtcaatggtagctcatatttttaaattgtgtaggttctaaaaattagacccactaagcattagtcactgtcctaggagtggtgacagttgtggatatttaaaccagagataagggaagtagctgttgctatgtaagtagtgagtttctggatttcagtaaaataaaccaggatttcgtttcttgaagtaattatactctggagagaggaaagaaggatggagacaattatgaatgaccttacatctctgagctgttgagaacttctggatcagtggctgatgttttcatagccttttcaagtgaaacctttcagtgaagtctcaagccacagaccaccagttgacaaaaggatttttttttcaaggatattaaccataacttgagtatcatataatgattgtcatattaaagaaaaaaacctccagccacatttttaaagctatttaacctttctgaaaactcagagttttgaaactttttagtatcattcaattcgttttgagtgttatcatttcagtgatttgtttaactttaatgtaagaattggcaaggagtttctataaaacaaatacaactcgtataacaactctaagccagtaatattgctgataccactgaaacccttatccctggacttaattgctctgaggaccgtaataagtgaagaaaactgttgaataaactctttgtaaggtccctcacgctgggaaatagttaagtccatttcttatctctggaatcatgccctttttgatctaatttaccaagtattgtgattgccaatataatgagaattctaagatagacagatgtaaatgaggaataatgggcaggatttttcttttaactaatgacacacagtaatgaaacttgattaaaagtatatgtcttttggccgggcgcagtggctcatgcctataatccctgcaatttgggaggccaaggcacgcagatcacttgagcttaggagttcaagaccagcctgggcagcatggcaaagctctgtctccacaaaaaatacaaaaattagtgagatgtggtggcacatgcctataattcccaactacttgggaggctgaggtgggaggatcatctgagcctggggaggtcgaggctgccatgagccatgatcatgctactgcactccagtctgggtgacagaatgagaccctgtcttaaaaaaagtatattttcttaaagtgacaaatgtttgacatatgtgaatgcatatgagatctcctctctgtgggacatttgtgccccttatctcattttacatagccatagacacaatataaaatcatcaaactttgttgatatgactgcctcaccctcaaatgcatcctgagaaatttaaaatagttttataatgaaactgtttagtatctgggtatttttggcaagcagtttatagatactgttcttttatttaaggccaccaccttttaacaagatgtgagagggtgttttaattcttctgcgttgtttctgagctgtgtgtttatttggcaacttcattctttgagttgtcgaaagaacagaagtttgtaaattatacaacactaaacagtggatgccatccatggcttttagcccaggccctgtcaaatggttttctattttctgtcctggccttaaacattattgtgaattacagaagcattagtattcatcaatttaaatctattgttttttaattagtttctaaaactctaattttaattaagaaagcacaggctcttgttgaatatgttggtaaaataattattgaccaaagaacaaataactttattgttaaatatttaggctcatatttgactttacctgtgttaggcaattttttttatgttatggggctatgcctttatatagcatctagcaatgaaatatatctatgtcattacattggtgacattacaccaatgttgtataattttggttaactggtaacattcatggaatagatatatgccatcgctagatgatatttgattcctttgttattacaaaggaatacaggaattgcaaactggttttaatctggcgctctttgggttcagtgacaatgtgttgagatcccatggtactgattactattgaggctggagggaactgtggtagtatatggccatgaatttattattcttgttacatacactcccagaaaatgctgtccaaagacctaacatgcaaagacacaaagctgttaactttttaataacttttcttccagtcaccagtaagatggttgaatttgtctctttcccatcctctttgctgctaaagaaggaggccaaacatctctagaaaaggtctcggtctgtgtactttgattctcaactcatgagcacaactgtattttacaaagaataaacagatatatccgaatgaagtgtgaaaagagccaaacaggacagtgtgagacttggatgagtgtctgggtcccatctgtttcacatttaggttcctagggtcaaggactacagggctgattttggtggctcccctgccgcccttctcagttgccctctggacttggcctgggaggatgggagatgtgggaaagccctgtcagctggctcagaacccaccctattctgcaggcatatctggattgcaaaagcagcgtgggtggcactgggtctgaggatcaacaatctcactcactctgtgtcttggaaagttactcagggcctcaatttccccatctgtaaagtgaggataatagtagctgttaagaggaattgaaggcatgggaactacacagggccctgcacagtgttttccacatagtagttacttaacaaatgtgcctgttgttgatcttcataaatattcataaatattcaggagaataagggataactataaatattccagaatcctccagcttcctcatagaaatttctaaacttcccttagcactttttaagtaagaatatcgttgccctaaaattaatatccctttcctatattcttctttttgccttttcctctctatcagtttctgcggccaatgcttgcttttttttctccccatttactcttccctagttccccttctgtctctgttttattctcttctttcttttcccttttcttctctttcccactttcattcttgggcatcttttattgtcctctcttcattctcttcttatttcttcttctcatacttttctatcaaaaggtagttgtgagaattactaagacaatgaaaatcagtgtaaaaattggaaagttattttaactaattaaacactaattttagttagcaggtgacattgatggtgttacattggagcagaacatggactaagcagagactgtgaactatgcacgtgctataaatcccctttcctcttaactcattccatctttagagataaatgatcatggatgactgatgtttgagttcatttatttgttcatctataaagaagtgctaagtatgtgccaggcattgtgcagcaattttggaggaagacagttactatgccatatggtcaattcattcttgatccatcgtaggaagtggtcagtgaagtaattgtggaattaatggccaaagaagagaaatggctgaatggagctgaccttgtgaagaagacaaggaaggaggaagctctggatgttctagcaaagtgtagctaattgtgtacagcagatcatacagtatgagaagtcagaaataagatgggactgggtccataaggaaccttacattctgaatttgttgttaggttaggatgtggtagcatatagattccaaaagttctgtgacttgataaaatggaagtctgtttcttgatcagtgtttggtcctgtcagttgtcccggttcagttgtcttaactagttagccatagtccatcacttgtgaatactctttgcttatatccttacctctcttacttctcaactggccattcccaagctctagtttgatctgattctccacctactcttcctctgcacctctcttaaagaaccattttataccttcttctatttaccttaacctctataccttttcccctcttcactgtcagctgataataaccatatctgttatttcactgaggagctagactaagatgaaaatatctacatgccacatcaccaaatcaaccaagcctcctgtatctgtcccctcttattctgcctttccttctgtcactctgtccttggtgtccttgctctagtgtaaggtgaatttccttccatgtacatgggatcccattctctctcacctcctgcagacatccttcagctattctgccctctctctgtagtatcatctgattttctctcccgctagatatttccattagtgtatgaacacactgtgctatcttccatcctcaaaaacaaatctcactagaccctacttaccactccagctattgcattatttttctcctcctctttagagcaaaacactgcaatttacactttctctttttttcccaacctcatctcacatcatcaaagagattctctttttagggccatcagttactgtcatgttgccaaatccaatggccaatcctcaggcctcattctatactatttacttttacactttgactcagttattcatttctttctttctttcttttttgaaaaactctagttgcttgagttcttgcaaaccatttacttttgattctcttcttatttcactggttgtctcaacttgcttttgtggttacttgtcctcttttcaccctttaagtattggagcacccagatgctcagtacttagatcttttcacatctctcttcatgctcattctccagggcagtgtttctttccaatgtcgcagtttcaaatgccagccctacttggatgactcctaaatttatatctctatcccagatctctccctttaattccacgtttggagatccaactaccagctgacatccccacatggatgactaacaggcatctcaatattaacatgtcaagaactgaacttttggtttttcctctctccccagacctgctcctcctagtgtcctccttattctattaggtgctcaggtaaaaaaaaattggagttggccaggcacggcggctcacgcctgtaatcccggcactttgggaggccgaggcgggcggatcacgaggtcaggagatcgagaccatcctggctaatcctgtctaacacggtgaaaccccgtctctattaaaaatacaaaaaattagccgggcatggtggcgggcacctgtggtcccagctactcgggaggctgaggcaggagaatggcgtgaaccctggaggcggagcttgcagtgagccgagatcgcgccactgcactccagcctgggcgacagagtgaggctccaactcaaaaaaaaaaaaaaaaaaaaattgcagtcattcttgcctcttctcattctgtcacatctacatcaaattaatcatcaaatcacatcaatttatttattaaaaatatagttgtcatctgcttcttgtcaatcgcactaccctggtcaacatcaccatcatctcttgccaaatgaaggcagtgtatactatacttggttggtctccttgcttcaccctttgttgtgccataatctgttctccacattgcaaccaaggtgactgattaaaaacataagttagttccagactctctagtggcgtcccaactcagagtcaaatgcaaagttcctaccgtgctcacaaagccccgcgtggtctgggcccagctcctctctgacctcatctcctaccacctactcctgtgtaatcaccacagtggccaccttgcttctcaaacactccaaatagtccctacatctaggcctttgggttattattttttaaaatgtgaacattgcatcttaaaccacggtatcaacttttttttgaatcacaggctttttcctcctcatttctggccacctgcagaattcatgaagaaggtcatgagcttgtcttttagtaaagtatttctaagaggatattgctctccatccttgtccagttcccattttaaaaatttagagaaaggtaatttttgaaaaacaaaagtacaaaaaaaaaagagtaaaatgtaaaagaaacactttttttctttaaggcttttgacttgatcaaaaagaccaggaaccagatgaagccatttcctgtattatgtaaactgtgtctaaagaagaaatatgcttgcactgtacaggaaagcatggtattgtttctagtgccatttgacatttcttgcactataaagcaattgatatgtgcactacaagctaatcatttggggaagtgtttttgattttgcttagataggtatatcattcaaattttaagacagttattcaaaattagggtgttttcagctatttgtttattttgagagaaagtcccatttaaagaaagtattattgtagttggctattttgaactatccatggtctttgtataaacttaccaagttttttttctcttattgtatcacagtgcaagccttattattcattttcctgataaatattttcctttcctaaggcaaagctggaaatttacttgtaccaactgacataattgaatatagttattatccggtgctcaaagctctctgatgtgctagacatgcccaagaactcaatactgtgaccttttttaagagtcattgtgaagaacagcattagagcatgatataactgccacagccatggttagcaaaaatgtaatacctgttttcccacggctttcatgtttggatattactgtatcttcttaatcagatgtctccctttgtaatttaatttatcatttagttggtaattttgttgtgtctactgcatgcaggaccctgggatagaggctgcaggtcatgtaaagaagcataggctgtgaacctactctcaagcagtctaaaatccttttaagaagacaagctgtgagaaagaacacagctatgtctgttaggaagaaaaagagaagtacttaagatttaaaaggagaacaggtcatcgcatgtgtgcatgtgtgtgtggtgtgcacatcataactaattaatgctgaggagactgtagatcagtcaattattaactgattatggaaaaggcattgaaacaaatacagaagagccaaataattgttagtgtaggtttctgaacgagagtgacagcaatagatacacacgccaaaatcaaagcaaacaaccaaaaccttgctaggcaattctctaggaaatcactaaacagcatcataatgactttccagaattaatgggactttccaaaatgcctatgataatttgaaagattaacctgtttgatgacacaatttgctataaaactattaggttgagacacatggaatagccactttgtgagtcataaaggactgagtatcagcgatttcataagatcaattgaatataagtgatctgaagaaggcagagactgtgtgtttttactttatacctcaggcctaacacatgaatcacatataataggtgctcagcgcatgtttatggactggatgttgaatgtgtacgaatatgtgaaatgtgaaaaagaattatggattttttctaattgggaaaaaatgtctttaatcttataaagacacaatgttattggaaaaaattgcaaaatggctcaagggaattgtgtgctttggttacttttagtagttacagagagttaaggaacactgggtattaacagtctgtcaatgaacagaaaatgggaaaagggtccaaggccacacttgtcctgcatttaaatggcctcttccccggtcctgatgtgtgctgtgctggaatgtttggttttgcccgtggtgatcacaatagctgcttctaaggcacttcatagcatcacacatcctgacagggtctgcagacatcatccagcccacactctcgctttacaggtgaggaaactgaggctcaaggtggcgacatgagtttgccttagtgctgtcatgtggtagcacaacgggaagcaagactcaagttcctgactctccagttagtgctttatctcttacaccgtgatgcttcaacaagaattaccccaaactgtgatatgggtggttatatgagcttaagataagagttgaggcagatatggaaataaagcctattccagatatggaaataaagccatttccaggaaatgagagtatttgtaatgaaaagctgtaaaaatcctaataataaagagaagatatgtttccttttaaggttacatcccacagctttctgtttccctctatatgtaattgtcattgatttccagatgaagttagtttttggaagaaaggactgaaaaagaaaatgggtgtatgatgatatcagaagtttatgcctggttgtgaatattattcatatatcttgaatgagtttattcaattctctgataatttttataagataaaaatatgcaaatatacatttgcatactcacatggacttctgagattattttaccattttttaaatttaaacttgcatatgtcatagaaaccatttaggtttttttgtcaaaagaatgtactgctgctttgtttaaaatagtgttactcagaattcctttcatatccttttttcttttagatcttgcatgtttatagagtccggtttcaggggaattcctttggtagtcttcattgaacgtcagcaaaatatattatttttggcttctgtcctgattaacccagacgttttaatgtgtgttatgatgggttatatgatggatagtcacctgtaccctgtgatcagctaaaacttggccacttgagttaaaccttagtggtggaatgtcataatttcccatcttttgtttgattaatacttccttttgatatctgaaagggaaatgtctggaagtgtccatcgatgtacagtcacactcaggatgagaaggaagacgtgtcttttatggggagagaattcagttgatcataacaagctcactcagggcaaagcatcagacactcccttttttaaaaaggaaagaagaaataaacagtttgctcacccttaaaagtgtttttttcctaaaattttgttgagttaaatacctttatttggataaaaaataatagcatgtgcaagagaatgaacaaaattcttaagtgacgattgacaaataaattttgttacaatgcatgaagttatatgcagtggctttaaatttataaatatattgttgtaagatgtcacatcaaaatatgtaattcttatttgccctttatttttgaacagtagatagaatatttattatgcctagagcagcccttgtgtacaaaaccatgacattctttaacacatagaattatttaagaacattaccttctcacttttttggagagagggagttccttataactcccaatttatataatatgtctcactgtatctgtaaataccaatattcaggaaatgcttaattacattcccaatgtttacatagatagtgttaattgattcactttagtgaatatttattgagcaccttctctaagtaacttggtgtaccagcagcacaatagtaaaatacataggcccagcacttgctctcctggagtttatcatctagtaaaagagacaattagggaacaagtcaacacatttacgtataattacaacttgtaatcagtttgctaaataagtagtgaaggagaatctaccttgctgtgaaatggcagtgagggaggggaccaggagaatatagaagaaaggggaagagtaacctaactaaagtaaatagtgtgggtaaatacttgaatcaggaaataatttggttaattcatgagaccaaagaaagcgagaggagtagaacaccatgagtagggagaagagtgaaaggaaatgagagtggagaagtagcaggatctggcccaggtagcctcagtggccaggataagatgtttgggtcgtattcaaattgctatggagcatcagaaactaggagcagtggttccctataggagtgggagggaactaggtagatgggaaacaaggatggtagggaggcttttcactgtttatctttttatactatttgtttatttagaaacatttgaatgtgttacctattaatagctttaaattttaaaaatttaacaggaggccatttacacttataagtaaggatgtatcttaacatgatgctgcatttatttttatttatttattcttttgagatgaggccttgccctgttgctcagatgggagtgcagtggcatgatcatggcttgctgcagtgttgaccttctgggctcaagcaatcctctcagcctcccaagtagccgggaccacaggcacatgccaccacacccagctaatttttggtagaggcagagtctcaccttattgttcaggctggtctcaaattcctgggttcaagtgatccttccacctcagtactgggattacaatgattctgtttttaaatgattattttggcgtttgtgtggagaagctattgaagggggcaattctagggaggtgatgatgcagctgtaactagagtgatggtaatagattgcaaaggggattattaaaggtttatttggagggagaaagaaagtctaagaattattgatgttaggagtaaaggagtgtgagggaaactagggtaattgtttgatcaatggaaccatgcccaatgatatgaaatatcaagagagaaaccagtttggaatggataaatctgaaattttgttttacaaatggtaaacttggcatggctgttaaatcccaaatgttggcatcaagtggacagttggatatgtgagactgcacctaaggaagtggtctgggttggagataagagtttgggagtcatcaacttccatatgatatttaaagctgtgatagtggaagggaccccctgtggggtaaggaggagaagaaggcagaagactgagccctaggccttgcccacactttgagaaggagaaagaagaaaccctttaggatgacagacatatacagccatagcagcaggagaaaaaccaggacagtgaggtgtctcagagtctgtgcatgtttcaagaaggatgaaaatccagggggctcttgttctagtctggatttttgctcttgtcacccaggctggagtgcaatggcatgatctctgctcactgcaacctctgtctctcaggttcaagtgattctcctgcctcagcctttgagtagctgggattacaggtgcccaccaccacgtccagctaatttttgtattttttgtagagacagggtttccccacattggccaggctggcctcaaactcctgacctcaggtgatccgtaaaccttggcctcccaaagtgctgggattacaggagtgagccactgagcccagctgtggattctgccacttctttctattttatatgtcatctaatttcttggaagttttcatttttcatctgctgaatgggatgaatatgtcttatctatcacacaggcttgagatgagcaatgttgagaatatcagttgaattaatattttcttagtatatattaattaataaaaatctattgaacttattgcataatattcagctataattatacaaaggaagataatcatgaattttttattacctcgataatgctttactttaaacacctgtgcatgagtgtcataaaagatatttaaatcagaattatattacaaagtaatattgaattaatatgtttacttgaaaggaacagagcggtaacaatgtacctagatatacttataaaaggaaaatctttaaccaaactagagaatattgaaatcaaaatatgtttttctatattatctttgttaacaactaatgtgtgtctaggtggagagacattcccaataactgccattgttacagggttaaaaaactgagttgaagtaagtcattgggaaggggaaaaaaaaaaacctttacacaactttgttaaagctagaacaaagagtccatggaaagcaccaggtgtgacatacaaaagataaggaacaaactcttctgtgtacatatcactcttagattatttaatgacttgaaagatgacctccactgaaaggtgtggcatgaaagtgagcatgaaacagaacactaatcatatatttcagcaactctgatttccagtgggctgggccttggtgctgacagtcaacgtgtccattgtaagacaggtttatttcttgcataagtttaccattatcttggaagccctggttactggcaaggcactctctgcctgccgccctccatgtttgttctttttttctgctactttggaacttagatatctggtctgatttctaaagtgctttgggcttccttgtgttgggattttttttccagcccccacaattaggcaatcatttattagtccttgtctcgtaattgagatgcacattatcattctccttggcttctgtgatgacttgttacacctaccttttccacctccttatatcatgagattaaagcactcagtgagctcaagtaacataataaaatctggaattaattaacttcactgaatatgattatattatgaattaagtagctccttctcagagtgtactgtaactaccacaataaataaacctataaaaatgcggttttcagggggtttaattttcaaaagagccttcactaattctattaatatttattgagtcctatcagtacctattgtatctaacctcatttattctgattagaaatgtcttgcctttcacagtagtgtaaatttactggtgaaagaataaagaaatcttaagctaccctttcaaagatcttatcgttacaaatgttttttgagtatcagctatgagccaggaaccctagcacagtgccttgcacgtaggagggactcagcacaagcttcaggagagaaattgagtggaaagagagatatctaattataaaaactaactctaagatggcattttaagagacaaaacagaggaagttaaaaagatataggaacaggaaaaaagtacaccaaagttatatttataatcagcaaactaatgaaaggctttcttaattattttgttcttaatactatggtaacaatgttttcaaagttgtcggaattttcaggttattgattgaggtgataggaaatattctatttaatgttgctttagctagactgccattttatcttctgtgtagctcagtaatacttatttttaaaatataaggaaagcacttcaacttctgaatggtccagcagcttataaatgtggcctagggtccaagaatggtgtgtttcatcaccattcacattagatcctttaaattaaatttatatttttatacattttattacttgtcaattggctccaaccagaggtcaataaggttgaaagaacaggaactgaggatacataaaaaacttttaggtgtattgatttggctgaattattctcatgggaacaaaatacaaagtaagtcaacactaaaattaattttttatattaattcaccagctgaacagatgatgtatagaagtgcgtggaaatagcttcactttgacatttattttaaaatatcaaggctgtcattacatgcacagctggattaactattaaaagtattttctgagcccaaaactatactgataatttgattcaattgattcattggaagtgagaagattggaaaattcctccagaacccatctctcatgcatgaggggtgatgaaattgcttcccttgagcaaacacaaaagcagcttcattgctttgtagtcacttggacttaaaattcatattttttgaaagcaaccacatttcttgcagctattcacaggagttctcatgaccctctctgataaccagcagtgtctgatctcattgtttagaagctcatccttttcttcctgagaaggaactgtttatttggcattaggccaatatagccaaaggaaagaagataaactaaaaaccaaaccaataaacaaagtcatttagtgatttgagacagtgagggaaaatggcagagaggtgcataaagcttccaattcactggatttatggtattggaaacaggatttggctttttgagtatttgaaaaaataaagggttagacaaaatcaggattggatactcacaactttggggctgcttctggttgatacagttttcagaagagaaagaaattgagtttgaatgccttaagtggactgtgtggtttgtttcacatggatttcaccactccctgttatcttacacttgagtgttcacatctttacactaccgcttaaggtcccagatattgcaacgtctgttatgaatgacttctaacatgtcttccacctccactgttttatgaatctttaggtcaggcacagagttggcatttagtaaacatatattgaataaatgaatgaatagtagtgtgatatatatatatatatctgtttcaagttgggttagccatgaattccatgagtgaaattttctgaaaatgccatcaatgtgtgtcattacatggagaggaaagaatggcaaggaactttcttgttttgtgggaagggggaagttagacttttgatgatgttacagacaattggcttggaatttgtagaaaatatgtaaaatggtttcttttagtgaaaatccaaagaattctcttgatcggtgacataaatttattggtggtgtttttcatgtgacctttttgggtgatcattgtcttagaaagaaataatgtaagagtagttgagtatatgtcatctctcttcaaataaatattaaagatgtgaaaataatctgaaagaggactcctcagtgtgtttaggttttggctctgttcaaatttttctttgttgttaatcttttatctggtttagtaaaatctagtttgtttctaaaatgttacgctttttttttttgagacagagtctccctctattgcccaggctggagtgcagtggtacaatctcggctcattgcaatctctgtctcctgggttcaactgattctcctgcctcagcctcctgagtagctgggattacaggtgcctgccaccacacccagctaatttttgtatttttagtagagatggggtttgctcatgttggccaggctggtcttgaactcatgacctcagtgatccaccggcctcggcctcccaaagtgctgggattacaggcatgatccaccacacctggcaaatattacacttttaaaatttatatttgttcatagtttttccctggttcaaaaaatattcattctattcattctttcaatcaatattaaccaggcgataattataatgtaataattgtttgaattcaccagatttctttttattttagagaaaaaccaacagcaacaacaaaaccctgaggcacacagactgggccatgggaaacaaactctgccattttcacagcaggaggtgttgtgccaccccacggcattcctggtccctctgcctgccctggagcattggcactgtgtccaagctctaccttgaatcactgattctcttctattgtctaagactgtgctacatttctaacaggacttgatacatggacatgtgtcttccttttctctacttgtcttgaagccacagatacagattgtatatattcaagttcagctattgctggagtgtctagtcctgtcgggccccaattgtgtttaaaaaggcaaggtagtggaactctcttcatatttgataacctagagggaacattttaaagcaatcattgacatttaggaggcatatattcactaaaaacccctctttgacatctcctagaataagtacagtcttctaaacatcatctgggtatttaaacaagctgcactgatgtcagtgctaagcccccctcctttgtgttgcccccatcatattgatttatacttgaaggaaatggacataaaaggatcctgtatttggggtttataaattttacagaataggctataaatgaaggattagtttgtaagtttcaccttggtattattctcagtaatataaatcctataaatatactttacttgattaacatgactgaaaactgtcatcaaaattagcatatcttttacatatcagaagcatcttacctcttggtaattacattatttgattttcctagagtaatggggaaaattttaatttagtttaaaatatgaataatgttcacacctgcaaaccattattctgcctccttaaatttcagggtctcattcacatcatcttacatttcattgctttgtttggggatggtgttgaaaaagtaaaatcataggacatgccactattgttgattctaagtgaaaagccataggctatcaacactgctagtgcttattttctgcattatgatagaaaaaataaaagacatattttctcccaactttccctagagtggattgggtggcatcttgcttcacatgatatgaatcatacattttccttctattcagatctctgtatttctataatcactttgtcaactttaagaaggagaggaaaatgatttgattggaggaataaagtctgttcaggttagacataatctagtcagacactcaccttgtgcagctgtttcactttcagagaataatcataacattgtgtagaatgatgatgagatatgttattatctaacagaatcgcgccgatatttaattaattccacattagccaactaacatgttaaaagagagctgtggctaaggtttaaatactgaacccacaatatagaaacagagctaagaaagattgcttcaagttaattcagtaactagtgacagcacgagaaacagaactaaaagttcatgtcttagtttagggccacttattgagcgaagccttgacaaatcataatataacccaacaaggtgttggagtggctataaaagctaatagaaccccaggctccagtatagaagtacagtgacctgatttaatggggtaatggttagctctgttgtactctcctctggttggaacccgtttgggttatcgtctttgtttggggacactatgttttgagagagagattcatgaactagaaagcttccaaagaaagggcacaaagatagcaagaagtgagatcatgtcaataaatggaaggacctaaggatattttagaagagaacacttagaaggtacatgaggactagcttcaaatatctgaagggctgtcatgtgctaccatgattagacttgttcattgtttttacatcagcaggtgtgaaattaagactatgagtctaaaactttaagagggtatagaacatttgaacaattataactgttttgagtcaactgggttaactaaaatgttgtgagatagtataaccataggtatttgataaacgccgcaagatcattttataaatgttttctatttgaatgatttataagagaggctatcatctaagattctaaggtttcttcttagtatgtaaattatgattatttactataaaatatcattcattttcttactgtgagagcagaaattcaatctttagtggcttgcattctctttattaacagagtcaaatctgtaattatgacagtgggctaggctgctcttaaacaaaggttatgacttcatggcaataggctgagggccaagagataataatcttaggctgacataaatctgaaacaatccatgaaattgttgaaaaacattatcagagtgcactcagttaggctcacctctgaagcacagcacaaacaatgagtcccttaagttttgcaaggtttctatgagggactcgtggctgtctcagacatgtgagggagtggaggggaaaggaaagtgaaatgatatggaaggaatcaagaatcaagagctttgtgacatcaatacttatccacattcatagtgaaggctctctccagcctatttgtaaaaaaaattatgcaatttgtttatttttatatttgatttctttgtggggcaaagagcaggagaccaaatagcatcagaacttgaggtacattaaccagaaaaaatgtttagctattctagtgaatacacagtttgaatgaaaatgtggtcattaaaattccatagtggctgagcagtgtgctgatatatatggaattatgcatatggaatggggctgtgattcatgaagttcagtagaaaagagctctgtagatcagattccgggttcaggggactttgagatggggtctgtctggtctgactggggtgaactttactttgaaaggtcttgagtgatttgctgaaggaaaagctgttagtaaatgatacaatggcgactcaaacccaaatcgggtgacctaatcttatactccaggcctaatctttacttaattttattccaagaacattttgatcctggtagaatcaggtgaggaaggaagagcaaccacagcctgggcgggaaggaaaatcttgaggagctctggcgtgggtgtgcactgggtggggaacccagcccctcctcttggcctcggtttgggcggcgggtttacagtcttcatgctgggagagctgctttttgaaccatctgtctgcaataaacgggcctcctgagtgtggtgtcttgggctctaatccttgagtaatgactataggtggaaattgtctctgaggcaattcctagtgagaactaggagttctaggaaggatctatttgttaaaaatcagccaacagcaattttccctttaactgtcttctctgagtctttgctccttaaatattcatgaaacttgcagtgatttcagattaaagatctctccaagataagtagttcccagaatcttatatccatggtggtatctggattcgtttctaagtttcccctattatagttcgaaatccctttgcaaagcttgtattgctttcatttactgaaaatgaacaatgctgaggcaggacccaaaggacattaaaaccccattatagttcacttcctgaaaccacacattcggtcatcctgcaggtaaaatcacttccccgtgcgtacaggggagtgtagtgtttcctcctcagtgcagctgcaatgtctctaaactggtgtctttactaagagtttgttgaatgaataaataaattcagattatttcatgtcccaagtcttcttgtgattgaatttgattcttagaatggagatggaatccatgtgacacattctattctaagtatcttcaaatcattacagtaccctagggccaaattcaatctttgatttgaattaaatactaatataatttaattaaatactagaattatagtataaggagatatgtatatataaatagatggaaatattaatagatgtcaaaatatggtttatattatattatatatgaaatgttatcaatataaagacacatttctctctgcatcttcatattgataacatttaatatacatatctcatttaatatataacatttaatacatatgtatctttgtatgtaaagagagaaccatatgtgtcttcatattgataacatttaatatggtgtatattaagaagtatttttatatcgatttccattctgttttattctttgtaaagtagaaggcatataaatacagataccataaagctaatccactccgtaaataaaagacatttttataacacagagatttttccaagaaggaaattggttcttctcccaccctctaaattgctctttattaaaaagaaatgtgtttgttcaggtttatttctcccgatgctggatgataatattgccgtggatgatgtataatcagtttttatggtgatgttcccacaaaaggagtggtttggaagtgaacaagttactctatggtatattcaaaattctccttttgtcatgttaggcacttctcctactctgtttctgtttatggtatcaaatcacaaggaccttatgtaaaacttatttcaaacatttgagattttagcacacttttcagattattacttgaaactctcctgaaagtttgcacatttgccatgaggaagaatttaataacaacacaagagtcttgtggctctctgacttttgtctttctgaggtattctttcctcttaagctaagctgatcagtcaagattatcattgacgtttacattgagatagaaaaaatgattttttttaaaataatatttttttaataattaccagcagcatttgagtcagaagagatacctcaagctgaactgtgtggtaggttcctgacctgcctcagtgctgttgcttctgttaaaaaaaaaaaatcagttgtaacaaacccaggcaaaacaaccttacatggtcaatagaatttttaattgcaaagatttcctctgacgtgagtgttaatgaatgtcaaagcaataacataaaaagacattacttgtttaatgattgatagaataagaaaaacacaaggtcttttgtcagataaatgactactgtttggtgttcctttacctcaggagtatcaaaagtgatctcagataggcaataatagcccaggagctaaggcagcaagtatgatgtagcctgttagattataaccaaaggaggaaggctaattaatttgtatcagtgtacttgttttctcacatggcaattttgacatactttagcatttttggtttgtttggatccttcattgaaactttctgaagaatttaaataagcatgtaaaattttatgggactggctttgtctatctgcagtgcaggtgtattactaaagacaatttaattattgctccaaattgttgaaagagcacagctggtggtgtttggttttgtacagatgttgttgtgacacagatctataacatgaaatgacaatggtgacatctaacaattgcaaagtaatagccaccaatgagttttgtttttctaagctatagtttacacctctggggtgtctaatatttgctatgatatgctctttgcatgcttaaagaattaatggtgacatattctgtatgattaaaacaaactttgcaccatgtttacgagtatgagaagcattgtaggtcagttctcaggttcatctcaggcaaaacacctttaagtttcaaaagtgccaagtctattcctgttatttattttcctcactcctttattactataattccattacttctttgtgaatcaagtcatgttatgctccttgtaactggctctgggaaaagctggtaaacaatctttaggggaactaggcgtggatttcagttgaaaactctgcccatgtagctaattcctatttgctcagaatgccctgagtttactgatggtctacaaagaacttgtgtggatgtaatcttgctggcaaatccacaatacaacataatcatggcttcttacagagcaagtttattgcagctgttgagggaccataactaaaccttccttctgcgtccaccagcctgccgccaagaatatttctttggcgttcttgctcttctcactcccactcactctgttctcacagatctgggagtgttataggatgccacttgtctgtcctgctgattttctcatgtcctgcctgaaaacttaacctaagatcattgttgtgagtaagagggcaatgacttaggagtcccatagctggagggggaaagcaagggccactacagactgctggggaggcatctatgtgggtctggtcaaaaaagtgacttgagaatggtgaggctcaggtttcatttcccttttcactcatcaggtgtttaagttactggaacctattcttgagtgctaaaggtgttctatctgaacagactatggttgaatcaggccagagcaaggtcagttggttcaaccaatatgttactgttgtatgagagctgaaaggcctgaaaaaggaaaacaaacaagcaaacaaaccatcaaacaaaacctcactttcttcctccacttgtccatgaatatacttgtgattgtaatacttgttttttattctctttgtgcagtcatttctaaagttctgtgaaaaggtgtctttgctttgttttgttttggtggaggtagagagcagcacgggcaatgtccctggtacaatttacccagaaactgagtatttatgttgactttaaggagaagaagaagaaatgaagttttccccagatatttgaggataggtaggtaacattgatgttcaaacataaaaagaatttgagagaatgctactagtttattttaccttcttgcaatgttgttttaaaggcataatggaaatgttttctacaagtactatgccctacaataaagtaatttaattcatttataaaaatctcaactttgaaatactatattgtattttgaaagtgatattgtactttttaatgttttttcataattatacatcatcatctgagacatttctgataccactttataattttagaatagcagattcaactcaacccttttaaaaatttaggtacattgaaatttgggtatgctgccaccaggtggtggcaaatccttcgagtcacgtgttattgtaatttaactttttttaacccttttaaataaaagcaataggaaatctttctttaaacaatatcttactcagaaacccaatatataaaatagataaaagtcaacctagatcctatggtgaaagtgggacaggaggttcaaagccaaaggtctgtgctcatatctttcctctgatgatctctgaggaacctcaggaagacagtttgaaaatccccatctcaattataatgcacatattttacgtaacattaagatagaaaacatttttttttaaataaagaaaactaagcaatagaaaagataatcttctagagcaggaagaaagaccgagaaagcatttatcagagcaaatggaggaaaaagagggtgcttgtggatccggatcaaatgtgatgtggtgagtgaagcaggcatgggcaagagcatgaatataagcccaaactgctgagaactctgtccaagcagaccaagctctgtttgggcacagtcaggacgtactggagattttggaagaaggactgaggcaggagggtatgattgtcctgagagtcaatgattgactgaacttcttcagatttttagattcatcattgtccaataagctccttagagctggggctgggatcccagagtataaggtcatcaacttaaaggctgataagccttgagctgtatttggttgtttgtttgtttttctagtggcttctctcccatgtgatgagagaggacagaacagactgcatagctgcctgtttacccagctccatacaatggggacatttgagcagagaccaggctactgcttctgcccctcttgagtcttgtcttggctaacatttttactttgtttgtgaccttacgccagtgccctcccaaatgatcaatacattagttaaaagcaatgtttttctctgtgtttggctaactttcccctgaaaacacctgcctgtagaaattgcaaactctcccagaaactattttctaaaatgattattttctctcaaaatatcttaaaatacggaacctaatgcaagctttgaacagacatgtagataaggcaagtatagtgatataactattctacattacagaaaaccaagatcctggaaggttaaatggaaatacaacaacttaaaaaaaaactcactaatcaactaaccaaaaaaaacccataaatagttaatgataaaccaataaaatcactagggtgtcttaaatcatatagttgttctaagaagtgtgtgtgtataacctacatgcagtaatgagtttctagttgacatgatagagcaaggttagaaagaggaaatgttagaattaggcaaaatgatagaaaatgcaagaatgattggaaatagccctgagcctctcaggctgaggtctccacctgaggactgtgatcaggttatttcagtgactctcacctgttactggggctagacactgtagatcacactggctggtaatcccataaagtatcaaatcattgattcaataaatataagctgaatacctactatgttccaggcactattctgaaatctagacaaactccataccctcatggactttttagtaggggcaaagaaaatgaataaatacagaaacaaataactatataatgtttggtaataataactgctatcaagaaaagtgaagatgaggaaggggataaagagtaaagggggaattgtagcacacagaaggtttggtacttagagcaggggtcaggtgtagcccctctgagcagggacactggaacagaaacctgaaaggaataacagtgagccatggggctagcttcagaaaaagcatttcagcctaagagaatagcaaggccaaggcggccgaagaagaaaccaacttgatgtttcaaagaaccagaaagccaaacacacgaggctagtgcgaatgaatgagagaggagcagtgaggtcagagaggaagggcctcaaaggccatggtgaggagtttggactgaatgtgatgggaagccaggagaagaccctgacggctgtgtggtgaatagacggtggggtgagcgtgaaaccatgaaggtgagttaggaacctactctggaattccaagagtcatgatggtggctggaactagcactgctcatgccagataactttctctcagactctcggcatgctctgttgatttgttctagctgactcctcctgcgataggtatttaaaagacaaatgtcagccacccctttgctagtcatggaggtacctattattagttataagatggcctggagctgaggtcttggataagtcacttcatctcactgagcttaggtggtccacattgggtccttttttaggtctgacatcctctgagccctaatttttgtgattgagccttaatgagctccaccacccaagatgaccacaggggcaatggaaatcattagaatgccccacatgcctctaaattgaatataatttgatccagatctttttccattccctgggaggctgcaaacattctgcaatacccgaattcagatcttcagtctcctattaggctgatttaggaaaccctgatgacaagaatggtcactgggtagagatggtaccaccagaattcaccctccccttcccataaccagctgtcatgcacttcacccttatggttctcaaagtggccctgtgagccttttcagggccctccttaatattcagttgaatctgaccttgtggctcagagagatcactgggagataacagatatcttgcatctcctaaattagcctgcacagagctcacagtagaattctggcatcttgttcagaaagcagaatatcacagggttgaaacaatcaatcctgagtttcaggaagggattctgtaggggcctttcatccttgcacagtgaatagatcttgcttcatcatctatcagttcaatcttttcatttatgtttatgattatctttattttattttattttgagatggcatctcactctgtcacccaggctggggtgtggttgtgcgatctcagctcactgctaccctgcctcctgggttcaaatgattctctggcccgagtagctgggattacagatgcactccaccatgcccagctaattttcgaatttttagtagagacagggtttcaccatgttggccaggctgctctcaaactcctgacctcaagtgatccacctgcctcggcctcccaaaaaaatgctgggattaccagcatgagccccaatctctttaaaatacaaaacgccaaactagttgcataatcatttgtggtccagtataagggtcatgtttcatgcctcatacacaaatggtagacaataaattttaaaatgtgaatctgttgaaacaaatatcagctcttgagtttttgcttgaagtatgcagctccctgtggtattattcacatgatcagattctacagaggagaatacctagtattcaagatgatactcaaatttagacacagaatcaaatactgatgtgaaacatgcagagtagctatctccatactaaacaaagcaaaagaaagttttattggatcagcatgtatgcactgcctagaaaaacatttcagaatgttctatacatctgaggcttgaaatagagcccactttcaataatagatgctataacaatgactatatccaatgggttaattaacttgtcttttagttttagaaattttaacttagtttatgagggaacagattttcctagttttgatgtgttccataccagacatttgcccacttctcctaaatataaactgatctcccacactgacagagaggattgagcatttctgaagtaggctgaggtaaaggagaaatttgagaatttcctgaggaatttagaggaaagtataagccaagttttagggcaattatatttactgtttaaaattaataattattatactcttctataatatgtcatgttacaattagttataatatatgactaattttcccaggaactcagttcttccttgatagtgagttggaggctgcatactttggagaaagccctagggagctgggcttattcaagtgggggaaatgaaggataaagggtgatttattgactattttcaaataatggatttttccaataaggaggatgatgttggactactgttcaccaaagtttgaataatatgaaatgagcttcgactgaaggatgcaagatttaggtaaagtatatagaaggatttccttttaataagtggagttcagcagagatagattcccaggccacaaaggtggtagtggtagtaggcaggtggctggtaactgttgaaaatgtgagaaaaccaccaaaagtaaatgaaagtatggagtgtaagtcatgattttgtttgttctgctacattctaaaaattgcaatttttttcatgagaatgaaacatgaaaaccaccaccatatccaagtacagtccatgatcccatttaagagaactccatgtaacatagaccgaaaactaattttacccaacccaactcgagaaatgattttttgccattatcaaagcattttcagtatttatgatctagaaatacagctttattcacttttatggtacaattctattcaaaattaaaatgtacaccatcagcatcatcagagtttattggttaagtcacccaacagtttttaagagcacagctctttacttgcatccacagcatctgaaacatgccatttttaaaatctgtgtatgtggctgtcactgggaggctcatctcaggtccaagtacataatcatgtaggtctggagctattattttttttcatgcatcctgtgggtgcacattcatggtctctacaaagtcactttttttctatatacgtttaaaggttattttaaaattatagagcaattcatgaaatatttgcaattatgagatcatactcaaaggaataactaataaatctgggttaaataatgttgactttttaaaaaatgatttcattataagacgtctttaaacatacaaattaaccttgattgtagtttttttcccccagttactgtgtttttcccaaaaatatctcaagtgtgccccataatgtacagagactttattaacatttggatacagcatgctttgtcttttctaagggatttttttttgggaaatgatttgttttatttggacatattaaagcatctattctctccaacactattgtttagggtagtatcggggctgatatacttaaggttactgttgtcggcttctcaaggtgtagtctaagcatagaacctttcattaaagggcaatgctacagcaatccaaaatagttaacactcctcctggtaccttctcaagaagagagtcatgtcccagaggtgggctcaccaagctacttttaaattatgcttcaatctgatgacttcaacagggtttaacttcacttagtggcaaagcttattttcaggtttccatatatgagacacaaagaaataactagctaaatacaagttgttttccaacctcagatgggaagttaaaattcctgcttctattttctaattcctcctctttattcccctgcccgagcactacaaaactcatcaggagttaattttttttagccaagtggtaatcatttgattttagtcaaactctccattggcctaatacaaatgccgagtaagagatgagggttgcacagcctgtcaggggtagctcaagtagctgtttgttcaaagtatttgctgaagcagaaacaaccctttttgttttgaaagcatgttaatgtgctaatgaaatgcacaaagcaaagaggttcatccatataaatgggtcatttaaataatgaacaagaaggaaggatgtggtttggtgtcagtactgattaattaggacataaaaataagtaaccatcccaacattggctgcctcccttgaaacttactctattagtgggcaatgaagttaatgcaattgacaatataattacaggttagtgagcagaacaatccacgaggaggttcttgtttcatttacagctttaattagctagatagcatctctgtgttaattttctcatctctaccttgctaatcttctggtcctcatagaaacaaaaaacctgttgttttcaactaatttcttagaatgttttgggtaccacatatagatatatagtattgttctaggtattcaattcaactaacttttattaaatgtctaccatctgatattcactgtgcaagcacatgctagtgagtttatagaactgtacttcagataaatgcaacgacgtccaccagcgacttatttttattgctctcttctctggaatccttttgtctttcataaaaaaagttcataaagtttctaaggtctggtgttagtggactgtgttgaagttgatggcatattgtcagatttattccttcaccaaagagttaaccttgaggcaactttatgcaatctattttacacaatcgtgattgaggataacacaggtagttgaaagttaattatcaactctgcttcaaatactgacggaacacctaacttgagatctattagcatcactggaggtcattgagactactggaagggcacttggaacacacacacacagacgcacacgcagcagattacatgagacaacaacaaaaccccatagaataccacttcagatgcctccccaccccaataagcgtgaatgtgatttgattagtattttcttgttactattaaatgatggctctgctgctcgttttggttcaggacaaatcaactgccaattgctaaatattctcaaagaactaatttcattctgatagaaccttttcaatgttatattcaaaaagcccatttttaaccttccagtgtagaaataactttcttatattgtgaaatgaaagaagaaatcaaaattaagttgtgttttggagaataaagaagaaagatactctttatgttgtagcaatgatttgtatcagattccttctctaagatttgtacttcttatatttatttttcttgcctattccccaggtttttagttcaaagtaaattatcaagattttttttttttttactaaaacttgcctctttcctctttctccccctaccccccaagtgtaaaacatggagaaagcagaattttctgttttttccataatggttcatttgtattctctgaacccaagactaaggcaagttctaatgtcttactgttttatatcaccactgaggtagcagtgacatgctggctgctgatgaataaatatatttatctggcttctaaacctgcttacactgttgaataatgagcagatgttaacaattactctaaatgtcttggatattttgtaaaacttttatcagacttagagtggtttattgatttagtcagaatcatgccctgggcacaaaacatattgtcgtatgggattcaacgtgggcggaatgcatgtccattaacattttaaactcctatacaagggccctgcttctggaaccttctgaacagtaggtatctctaatatgttcttgctcttcctgcataaaccaaagcatatttattgacaatttttttacggcctcacttttaaggatacaacaattgtatccataaaatacaattcctaattgtacaaataattaggaatgaaaaaaatgaatataggatttgaacaccagcttcatgcatttcaagtaaacattacaatccagcacagtaacaactacccatgtttgtttctaaagtaaatcaacaaaaatctatattcccatttctctggaattatgctttgttttttatttttttaataacatcaagccattttagttgaatgatacagaaagtcactttgaattcaaatataaaataaggtcatccatcatgttaacaatttaattacctgagtatatatttttccagcaaaacaaaaaaaacattatttgttgtgtatcttattactgagctgttgcctcaggacagcttggctgtcagtggacaggccctgtggtaagcaatggtgagatagggagcagataagcctggcagtcctctgcctttctttcaggccctctccatccgtgtttcctggaggccttacctgttagggtccttgtaatctttgtggcaacagtgaaatggtgacttgtaaaggcagcgaagcatgacagagagagagaaagggtcgaatgaaatagaaatgtgatattttctatcttcggagggcccaggaaataggactccagctgccgagctggggtttggcattcagtatcacaccgagtacaaggaatgttgtgagatttattatttaggactcatggaagaggcaaattaaacaatgcactagtttctcttattgtttaagtagctgccttcccagtgatttcagataaaggtataagttcagcactgaggaaatgagatcagaataagggaggcaaattggaaaagaacagcttctgggttcttctcggggcgttggaattgccgggctacctcccttttgaggactcaccaggtagcaggcaaatgtctgtaatgtgggtctgttgctgtttgcttgtttgttttttaattgtacaccctgactcctacaaatacctataacaacacaacctaatacgttgatcatatagcaacaatcctttctaatctagggagtggtggacataaaaatggcaaggaattttttgtcctgcttttacaattttatgcactatggtggttggcagttttattttggcctgattccttgcagggagcgttgtcaaccgtggaagacagaaaacaaagaccagacttaaaccaaccattagtacatgctgcctgtttcctggctggataatgttacaagaagggaaggtattctattcttactcaggctctgcatcgaggataagttttgcatttcagagtggaagactaataagtgatagagacaacagggcttggtcaacaacttgggtatgaatcacccaggtagcagagggggaagctgcctagaaggaaatctttgcttctgaacctcatccaggcagccctactgggtccctctctcatttaacctgagagaacttagttcaagaaatacgttcattctgttcttgcctcaagaagagctactgatcattttatggttaaacaaatccacagaagtttcttcgaagtgaatttcactgtggatgattcagaaattgctgatgatggcaaggagagggtagattttcttatgggttccttgataactttacaaatgcatctgattttcacagcgaatgcatgttttcataaatggaaacaaataaaacagtaggcaagggctttttcaaatgcttgccaagtacattaaacacacaaaagtacattcacagcgaaagttggttgaaaacagctgttttaaaggatttttgttgaatgtagttaacagcatcatcattataaggcctgaagcaaacatgttactgattacaccccattaagaaattggaatgcattcccccaaggaaacaccatagcacatgctatttgaaaataacaaccagctccaaaacgctcagctaagactttgttacggattgtgcagcctatctaataaagataaaactctcaggaaaatgagagtacatcttatcttaactaatcagaatatttttcacaatattgtttgagtggaggtttccttggcgtctttcaccttttccccaagctggctctgtttactgcagtcacacacttgtagctgaaattctacaagataccagatatgaaggaagttcggagattcaacttgctattgcatgcaaattcagctgaccatttgtttgaatgtgaaactctatgtagttctaagtcagcttcttatcaaatgttgtttatcctgggagcgcagagtattcttcaggtgggacagaaagctctggtggggtctgtgggacatggaaaatttaataaggaccatgggattagggctctgagaaataatgttcatgtgttgaaaaggcactgtcaaaacgccacagaagcagggctgcagagcgtctgcagctcagctgttattgtccagcctgtgtctgtgctgcctgtccaccatggcacagacacggctctacaaacacttttcataatggcccagaagcctcctgagggccctggggagttaggtagagaggaattcaaagtccaatactcggtaagaagaagttaaaaaaaatttttaaggcttttataactttacacacatctgaaagagaggtcagatttctcctggtgatgaaagagtcaccgctggggactaacctcctttcacaccatgggggccacaccatggatcctgttgtgaagggcaacctcccctctcccacttcctgaaaggtggggtcactgcccgagatggtgaggaggactgcaatgtccatggaagtactggtgtcttatatacatgtaaaactcagtgataattatggcaacactaacatgagaaattatatgataataaattaagaattttgtagttattatttcactgtgtcattcacctttgactcctagtgatgggacttttgatgagtgctttaagctttgtgaacctctatgtccttattttttacaagagaattataagacctatcatatacaacttttgtgagcagcacattcttagcatatatatatggatatttatctatacatttgtatatacacacacatttgtgtgtgtgtgtgtgtgtgtgcgctcatatactttaaaaaaaggatgtcagcattgcttggagattcagggcctatttgaaatttaagattgtgagagaggcctaattatttgttaaaggggagaatgttcctgggaaaaatccttctcctccaccagtttggaactttggagaccctcaggattaagctgagggaaaaatagacttcttaggctagagtgcatccctgcccagagtgatcagggatcctaatctcaacgctcaggattcccaagaccacgaaggaggctgctagaatgtgaccccgtggtttccgaaaggtaattatacatgccagatggcagtatctgggagcaggcggtatcgtaaatgcagttccctgtgtcgtaacctaaacttcattttcccttatcgcatggttcttggagtgtggaaggctctccttgggcagagtcttgatgggagagctctgaactcagcagagaagactgggcacaaagcctggcaccagcaattggcctgtgcacctgaaggaactatttcgaatgggacactctttacaaagcaccttttgtccaggctgacagtgagtgtggggaaaactagtggaaatggtgataagtttattacaccaaaactttgatgtaacagataaatctattattgataacactgcaaccatgagtcttgggaaatgtttttgataacatgacacaaatattagtattaccaactatcagtagaagccatttgccagaaaaaaaatacaggtgattttgaacaaaggcaatggtgataggggccagctaagaggccaggtaactatgtaactctatcaccatttcctttttcaatgaattgtgggcaaggtaaataattttaaggaacctacatgtaaatgcatttcagaaataatttcactacttagagtaaaattgatgtattgtccattaaatatgagagagatgccagtaaaattgtacccagaaattctggagatgagatctataattagaaatttcatcttcacaaatgaaagtgagctgggaggtacattctttatcatatgagtattattctgtcttattattgtttaaataattgaggcaatgtattatttttcctggcaagcaagctatttttttcttattatacaaataattatctcttttttttttgagatggggtcttgttctgtcaccagggctggagtgtagtgatgctgccacatccagttaatttttaaattttttgcagagatgaggtctcactatattgcccaggctggtcttgaagccctgggctcaagtgatcattctgccttggcctcccaaaatgctgggattacaggcatgagccaccatgcctgacctctttttttgtaataagtgtattcattttcttccataaaccctcatccctttctccctaaattctgtaatcatttactgaacatctattatattctaagtgcagtttaagttactagagagagatagagaaaataggttgaatctctgatcctgagcaactcatataacttcttttgttcgaattctagatgtgattgaagtcagcatatactttgaataacattgtccccatggaaaaaaaagtttctcatagaaattaccgtaaaaaagggatctctcaagtgggtggccatatgccagtggttgcattggggcacagaaaaaaaaaaattaagaactgtttctactgttatacactcatatttttatttggatttatcaatatacatattattatatcatattatatattagtacagtagcataattgattaatttataaataaatatattaacatattggaggtgcacactcaacaaattttattgatgggtatgtgatgataaatgcttgaggactacagctctagattacattcttaatgagggcaaagggcctggccatcttgtttggccttttactgtgaatggcagcgtcggtcacatttgggcacctaataaatatacagcaaagaatgaataaatgagtaaataaataaacaaatactttctctttcctttacagctgctaaataaaagtggtctatttaataaattcattattcatagcatgtggcaatgtgctagacagaatatattttataaaagaccctgacacagacatgttatcttctccctagatttggggtctaattgtaggtctatgcagcatatctggggggataccttcttcagggtttagcaactcgatatccctcaaatcgcacttcatgggctactcctgtgcatattgcttacttgcttgaccttgaaaataaggtactgtggagtcaacacttgaaggaatccaagaaggttatctggttgatctcatttcctttctggatgagacaatacagacaaataggcttatactctattttaaacaattctatatcctcccccaggaacctaattaagtgctggaatttgggtttacttttagagataatagatatttgaccaagaaaaaaatatggtaatggtaagttccttaggtttatcgaatattcagtgcttaacattgttattctttctcctcttctttgtttcagtagagaggaggatgtaggttttgtgaattcatagaaagcttggaggttggcaatatagtcccaaggaaataatgtgcaaaacaacaacaaaaacccaggtgactaaagttttgatattttctctgcaaatgcattccttttaccacttccatatttacggttcaattaagtctttttttaaaaaaaatttttttttgagacaggatctcattgtcacccaggctgaaatgcagtgttacaatctcagctcactgtagcatcaacctcctgggctcaggtgatattctaatctcagcctcccaagtagttgggactgcaggtacatgccaccacacccagctaatttttgtaattttttatagagatggggttttgccatgttgcccaggttggctttgaactcttgagctcaagctatccacctgcctcagcctcccaaagtgctgggattacaggcatgagccacaatgcccagccctcaatgaagtcttttgcaaataaatcaaacatatgattttgatgcatgacaagacaagcacaatgataaaaatgaatttaaatctatctgggatcatgctttagagttcacaaagcattttcacacaatttatcacagtctcactcttacagccaatcagtatatgtttcccaattttgtggagaagaaatgaaaatttcaataagtaagtgacttaaccagggtcccgctatttctacacccagagatacttcctctacgttagtactcctcagatggcaatgtgaatgtgatttacctgaggtccttgattaaacgcagaatccgattcagcatttctggggtggggatggagattctgcatttctcacaggtttccagtaggtgataatgcttttctccaaagatcacactttgagtggcaacattctacatcataattggttcctatgtgacgtgattaaagataaccatgcagagtagctttgtgcaatgtgtttaggacattccaagccaaaggctttgaaattggttatgactggttcctgcgggaggagagcaatcataataccacgaagagttaatcagtcattctcctttctaaacttctctcaaatatgttctcttctcgatttcacttctgctgcttccattcgagccatctgtgtctctctgctgggccatcacaacagccccagattgttggcatctcttatttgccatcagcctctcccactggcatcagttctttctgtctaaaatacaatgtcattatgctgttcccacctttaaaggcccacaatggtgttcaatttccaatatgatcaaatgcagtttttgagcacagcatattagggacttcacagtttgacctgtccccttcatccatacctccagctacagcctacactgtggccacaacccctccctatttagctttagacactgtatttcatctaccccaaacatctcacattttccaatatagtgtgcttgctcttttgcttccatggaatttcatttctaaatctgttctatttctttactagatctagtgacaaaagtttttacaatctagtgagatagcaggaaatgttccttacataaatatttgttgaatgaatacactagatgcctgatataactacaatcattgttggattagtatgtgaggttggtaaatagttacaaaactggaaaataaaataagtaggcttggatatttgcctggatttcacaaaaagattgttaaaggtaatcatattatggttaaagaatgcatggaaattgcagagcagtttatttagctgatcttgaccaatggcatgcttacagtaaaagcaaagggaggtcctaactctagattgtgcctcatcccgtggcatgttccacagacatttctttcccttcttgccaatttatttcattcagaagagtaacagtctgggtgacatgactgataatgttagctggcccatttgtatttctctcctctgcttctgttctgcaatttctgtgagactgctgttcatttctgagatctccatgaaagaactttaaagggtggtgcttttaaaaatcttgacccttttgtaacaacaatgaaatatcagtcttgtgtttgcaagcaaaatagcagagcttttgcctttggggaagcaagagaaacgacaatagccaaagggggcagtaagactgttctgttagaacatcagtattcgtttttgttaaaaaaagaaaacaaaacagcaagttgccagagaagctaattgctaagtaaaatgtagattgaatattgggcaagatgttaaaaacatgtttgaataagtaaatattaactaaacaattagcaatagatttgattatgctacatgaaacaaaacggtatgtgtataaacacaaagccacatacatgcacaaacgtgtaaaatatctttaattttcaggaatgaaattctctagcttttctattatcaggaatctagaagtttcccttttcttcttttgctctcttctgctccccaaatttccctttctgttctactactacctacttacccgctttccctcctcttttcctcccctcatttgtaaaacatatttcccactgaacaactacgtaacaagcaacttactctggtcttttttgtgtagtggggggaaggaggggaatgtggtgaggaagaaactgacccagctaattccaatgttccagacagtgaacaagacattggattctaaatataagacaaaggcatgattcaaacctcaagaaagattgagatttggggtcaggagccctaaaccaattctaagttgtgaagatcctggtttattatggtggtggttgatgtgaggaggagcaaagctcctgcctaatttggagagaatgcttagaaattgaaagtagagaccaaggtagaaacacatttgagtgaactaagccaaatctgaatgaatgacttcttaatctaacctaaaattgtatcaaatgatgggggcatagtttttatccctttcattcagaagtgactcagcaagcactcctgagcctgcctaggccagagcacagtgcaacatagttcatatttggaatgttggtgctttcaaagtactgaatgtttttagtgtctccacacctctggaaaaaactggacagttcccaatatatgacttgtctcttcaaggttaaataaatgctcaaacagtgaataaggcaagggaccgaccagaaggagcttgagttcgtcatgcatcaggaaccttcattgctccctttggactgtgctggccaagactgctaaagcatttccattgactattcagctctaccttttccttatgttgttgtctgtcattctagtacattggttatcagacagattatgagagaattaagatgaagaatcttgtagttatatagatgaacctgataaaactttccagctaacctttggaaaccatccttagcaggtactgtttctgagattatttgaaagctttaattttctatgttggcttttatgttacaattctcaaaataaatttggaagccaccaagtttttactgcattcatttggtttactgcattcactgtggtttaaagtttatattcaactactaaaaataaaattgatcccagttaaaggcatttaggactggatctaaatgacttgtagaactggacttgtccaatatgcagactgaataaatcaccagagatttttggcaagatcaaggcctggcttgggttgtgcatgaaattccgatgatagcccaggaatgtcaggaggcttaaggctaatgtggtccttttaagagagagtgagaaataagagagaatttctgtatatgttggtacagagcctgatgaaaaacatgaagaaaatgaacaaataagatccctatacattgttattagttaaggcgtgccatcattcattcagtgaatgtttctggagagttcactttgtttcaggaattgtgcttgatactgtgtttgtaaatatagcaactgttttatttctctactaagttggtccactttagaaactttgaaccaggaacttcagggttaggaaagaaaactctgagacgtccatgattaatggaatggatttgcgcttttctggagcagatggtacaggggcatctctttgggagaaaccctggttggaagtcaagaagaatgttttgcggtgtgagttcccttgttacagtcatatttaatagttagagcagagttcacatctgggaccccttggagaattagccattgtgagaacagtgaaccaagaggaaaccaaagtaataaatattggaaggcttgatctgatctcttgcctgtcttcaaaggaagcttcatttgtaaaggacatgcatgatcatgaagaaaggacccccattaggcaatgtggaaataataaaagactatgtccaaagtccctggtatagggaggttaggggactggctctgtgctcaactgggagagtgatggagctggactaaaattcatctttggttcccttttcagagtcctctgcttcatagagcacaattctttcgttttaggctacattaagatttatctgaaaaaaacttctgcatagaaacagaagaattagaacctgatgagacagtttatgctcattcgactttgttttttctctcttaagtttttctttcttaagtaagaaagtgtttcttatcccttttttgttttcagggaggtagtatgtttgagctcctcctgtgcttacggagtcaagaagaaaatgaactattcttgaatacccttgaatacccttcacctgtaatactaaggatgaagaccagagaaacacattgaggcagatataatatacatacccattttctctcttactctataatgctgcctgatgtagtttgaaagtatcctcataatctaaaagaggggaagtagcctcatggagtgaaatcctggtactcctagaaaattatgacagcacttgtgtgtgtgtgtgtgtgtgtgtgtgtgtgtgtgtgtaacataaattagctcatgttgtatgtctttttgcagtttgtgtttttcattaaatatgttgtgccttataataatagtagatactttatataatgctcactctgtgctacgcacttgctatgcactttagaaacttcaaattatttaatataggcttgctacattgttttaaattacatttagtttggttaatctctagtttttggatatttaaggtgattacattgttttttgtttctataaacaatgctgcaccagatcttcttatgcgtaccttcttggataagggtgaatggttgcaaaggcataaagaagatctagtacacatcacctgataacagtggttgcctttgaggagagggagcagacatagattgagttgtggttctaggggctttagcttcatatgtcatgttgtagactttttttttttttttttttttttgaggcagagtctgggtctgttgcccaggctggagtgcagtggcatgatctcagctcactgcaacctctgcctcccggtttcaagcaattatcctgcctcagcctcccgagtaggtgggaaaacaggcacgcgccaccgtgcctggctaattttttctatttttaatagagacggggtttcaccattctggccaggctgatctcaaattcctgatctcaggtgatcctcctgccttggcctcccaaagtgctgggattacaggcgtgagccactgcgcccggccataggacatttttaaacaaaaacatagtctcgtattacttgtgtgttaagattatttttaaaaataaatgtaaggcttgaagtccttaggcacataacttaaccaacctgatctttttaccccccactttcaaaataccacctaccataaatacttgatgtgtggctatggcagacaaatgcagtgttatatgttaccattgctttataaagtgctaaatatattcaagtgactcttattctaacatagctagatttcagtcatcagtaaaggcaccttagaatccacaagaagtaaatatgccagtgagcattccctagttttaacaaggctatcatctgcgttaaaaaaaagaatacatgttgtgttagtaagaattcaattcagcatgggaattcacatatagctttgaaatttcatatttacttatgtaaataccagccctcttaatttattacaactttacttgttagaatcaggagtacttttgagaactggtattgtgtccagcattgccaacccatttaatctgtaactcacatggtatagtttctggagctttgtttcatatagctgttataattatatcatgtgaacaccctgaacctgtgagcatggaggcacacacatgatcaaattgtagcagtaaaaaagaaaaaagaagagagtgaaattaaatagtgtattttaaattgccatttgcgtatcattagaaaactaagatatttagcagggtaacaatgttccagcacaggtgaccttggaacattatcaaatcttcctgctcacaagatatagcatactttaaacgccctaggcaggagaccttccaaaaacagacccaatgacaacacctagataaccatttcaatcctaaataaatttcagtgataaaaatgtgtataaatatctaaccctatgaggatagaaaatgtatagttggctcctttctgtgtaagaatgttcccttctgcagcaatctgttttgagatcaggtcaaatgttgccagttagttttgatttcctggctttttaaaagtccttgtcttaatgtcactactctgggccattcatactattttagcaggtcctatggtaagcatttctccatataagtacatgctttgaataactcagaggggaaacacacacacacacatttgtgccttttcaggtaaaaggacttcaatgagaactctgctagaaactttgctacctagcctagttattgccctacctgttttctggaagagattttttcccttctaaataaggattgagccaaagaaagaataaaggttctttatggtttaaatatgccactccctcttgtgcacttttatggagtgatgccttttattttagtttatattttatatctatgattacttcaaagtctattaagctctggaataagagatgcccaatagaactttcagcagtgctgaaaatgttctgtaatctgcactgttcaatgtggtagttgctagtcctatgtagctattgagcactagcgtgagtgaggaacttaatttttaactgtattttaaaaaattatttcactttaaattgtcatatgtggctagttgctaccgtatttgacagtgcatttatagatcattttatcacattcatataggactagagaaacttcaacatttatattgtagacttttcataaggaaaactaccccctttagttctatttagcattatttaatgtgcctccagaatttgaattcaaaccctattctccagggtttgttttgcttcaaccttttgatttcttcctgctcaacccctgtgctacattcagctagtaggtatttttggcaacttagatccagaaaacagtgtagtgctaagaaataggaaaatatacttagttcatgatatacattacagaatggccttattagatttcttattctcattatcaagtttacattatcacgtaaaacaagtgaatgtttattgaaagtgtatctttcctctattgaatatcaggcagacttttaaattggcagtactcctcactcatttttaggaagctttggaggccaggcacagtgcctcatgcctgtaatcccagcactttgtgaggtcgaggagggcagatcacctgaggtcaggagtttgagaccagcctggccaacatggtgaaaccctgtctctactaaaaatgcaaaaattagctgggcgtggtggcatgtgcctgtaatcccagctacttgggaggctgaggcaggagactcacttgaacccgggaggcagaggttgcagtgagctgagatcataccactgcactccagcctgggcaacagaatgatactccatctcaaaaaaaaaaaaaaaaaaaagctttggagaggtgtgagtcattcctgcctgttgaattttagctgtgagctggcttagtggcctccacacagccatgatagcacacagggacaaaaccatcctcttcaagggtttccaagagctaaattgccagtaagtaggaacttcttgctgccctatggggcctttgaatgtgattaggatgagcaacgattctacccagaagtgggtagaatgttgacgcagtaaacatgcagattactcgctgcatacaccctagtcttcacacacaccgcctaagataaaactgctatagagaaaccgtagcattcccaagcccttctctccggctccttctctttacttagaggccaaccaggatgcgcagaaaacataactgataccacttagataattattgactagttttagtgttgatgggggaggttgaattccttttctcttcctggttatatttcactgatgcaatttgcttatttctatgtggaagcatgatggtttttactctttgtgatgagaacttcagcgactgcaacaaaggtaatttggtaaagtgctcctacacagcatatatggctttaacattttgaactatatcctttttaatctatctctgtgattttgagtatgcaggtggtggtggatatacaaaatcatatagtgtattttgtatacccttgctttgtaacaaatgttctgatgccttatttgtggcaaagggatgttatagaaaatgtgttctaagtgcccacataaaacggcatgtgggcagctgaaatacgaccaactcatgcatgcattcctcttcctcttgaatccttggaaagtatctcaatttcctattctgtagctgactacctgtttttcatatttctgtgtttggaggaggtagatgcttcaagcaggagttaaggggatgaggtgtttctccttggccagcttgctgtcctctcacccttgctccagctctttcccgcagtcctccctgcctcccctcctctgccctcaccagatgtggtgaggtcgagacctcctgcacccagccagtgcccaccctatgacccttttctttctatttgaaaagtgtgagggatggggtaaggggaatgacattgccagacaaagagaagtttttcaaaagtgtatgtgcaactgaatgtgcagccagtgacttttgaaggtcacaggggccggccaggtgtgtaaatgatttgctttctccctttcttaacattcttattgggaagtcgtcatccacaccagcttctaagatggtctcctcagcattcagatgtaatttaaaatgtataccaggaccatgtcagaaaacgttttaaagattatctttacatatattgtcctcatttgctattatgtttctttaataatatataattttttttctatgaccaggttccttctgcccctatttcttttacctcaaaacattctggggacaatgtaaagaaagctacattgagtttgtctcactaaccagttgtgtggtgcactgagagggctaaggtgactgctaaggttttctgtagctccaggaatctgtgattcaattccttccagagcctatgtctctccccaactcccatgttagccacttctctttgactcccatgaatcatgttagatctccagtagtctctgggtcctactctgggaactaaggcactttcatgagtctcaggagagactcctttgcgtttaacagtgtgaattcaccctgccaaagggttaatcttccaagactaagtgcaagctgggtaaaataagcgaagatcaatggttgaaccctgtcatgagtggggtattcgatcatgcaggtttccagccagatttttagaaatttgcatcacagaagtcacctgggtgtcacactctgaggaacgctgggttaatgtgtggtgaacagaaatatcaagtttatgcctatagggtagttttcattggtatgagcttaagcacagaaaaatggccttgatggtgttaatttttttatgggcagttgcacgatggctggtctcggaatgttagctgcactgttgcagaactaaaaatgttaccctgagacattttaagagagtaataaatatctggttttaaaacacagactttatttttttctggaaaattctttttttaaaattttaagttctagggtacatgtgcacaatgtgcaggtttgttacataggtatacatgtgccatgttggtttcctgcacccatcaactcgtcatttacattaggtatttctcctaatgctatccatcccccagcccccaactgcaccacaggccccggtgtgtgatgttccctgccctgtgtccatgtgttctcgagttcagctcccacctatgagtgagaacatgaggaaaacacagactttaaaaaattataaacttggaaagtcttttttggttattgttgttgttttaatatcagagtgttaaggatgccttttccttttgtggctttctccataagcaattgcttggcttggtaatttagcgattatttgattgttgaaacattgggtatttgtgctttaacaaaaatatgcctggtgatgagactgtgtccttttatcaggataatctggcttcatgatgtgaagacgtggctgtgctcagggctgggggctgcaacccctgctgtactgtgccaaggatagtcctttgatgtagagggagtggttcccaagaagggcaggtgtaatttccagacctggattgcatgagtttgatgcatactcaggaaactaactgcaaccttagtggtgctttgggagatagttataccatgggaattgactcccttcggagaaatcggacttgtctttgttactgtctacgtggagtgaagtgctcaggccagggaaaattgtatctcacacttaaatatggacaagaaggactcaaactcttgtcaacatcttcaaaacataaaagcagtattacaaaaaatttaaaaaccagcaataatttttactaaagttttgtttggctctgctaatcacttttcttatagcttcaactttttcttgattaatattttaccatgaatttgggccagttattgcatagtctgtatgattattattgtacttaagtattagtccatccaggggcaataatttacttatttttccctctagtgttagttacttgcatggtttaaatttatacgattaaatttaacaccaccatgacaacaacaaaaaccctactgaatgtagctttacctattgttgatatgtatttaaagtaaatttccagcagtagaattatcaagattgtaaacactttaatatttgtatacatattataaaatttctgttcttgctttctgaaagggttataacagttttcaaagctttaggatataagtgtattttacctgcactgagtttaatatttaacataaatatgtttaatatataagttgtggaattataattaaatacataaatattataaattgcatataagtatatatagatagatagatagatacagatatagatataatctggaaccttaaattcctacttcaataatccatgaaagtgagcaattttttcacgtatttaggatttatttttcacttatttgaatgtgcattcctgtcctctattgtagttttcataaatttaacctagccacttggctagataccaacccatcatttaaaaatgtatcacttattatccagattctgataccagacatataggccagaacactgtccctttcttaccgggatcagtgagtttataactactatacattgtccttttttgttgagtgcgtttgaatatgcacaatgaaatgattattttttaatgactctgtaaggtaaatgcacaaaacacctacactttgggccaagtgagtatgaaatacctacacacacacacacacacacacacctttatatacgtatgcagctgttagaaagctaaaatttgaacaaaaatatttctattttccacttaatgaataattattgccataacacaaacctactctcttttaaagtttgaataaaattgaagaaaccaaaggtgtttatgtaattaaaaatagcaccaaagaactaaaataattagcttttggtgttagagaaatcttaaatgattcaagcacctgctgaagacatacttgggtgccagagataaatgatactctcatttttctagcattaagtgaggtttagtgaggaattcctattacagagagcatgactaggatttttattgagcaggaggccaacaaattaagaagcatgttttaatttggcaagatattaactggaatccagttgcattttctgccatggcaaacctacaaaataaagtgatacttttcattcttgagtcataccctgagtgcgttttgagttcattgcaactaaactcagtgccttctaattaaagcgttttgtccacatgtatttggaatttgttagcagggagatttttttaaataggtggtttctattacaaggaatcagtcaactgattttttttttttctttttaaagctgtatacagatacaggatggagaaataagcaatccttttcaaagagttagaaacttagcacgctgacttcagccctcacttaatcattaacttaatatgctcctttgggtagatagagcattcaaaaaagtctccatgcctcagtgtattaatctagaaaaggagagcagcaacataatggcaggctgaccacctaggaatagcatgagaacacgaaggtaaacacatggaaatgggctttgtgttcaccgagaggaatgccattcacagatgcaaagtggtattcaaaaactagttctcataaggtgcttattctctttatttcttaaagaactccttgctccttgaaaattcagacctttcatcttaccaggataggctggacttgctgctgtttaccaattaaatccgcttagtaattagaaactgtgtgtcttccgcccacccctcaattccctctccccacctgaaactcttaaacaaacactgggtctgtgacaaatggtgcattttaataaatgttttgtaaaggccaattatgcagtcaatattgagttgtgcgataggaaatacagctgcttggctatagggaagacgtctacatactactggcatctgtttggtaggtaatgttcttaaatggcctggcctttctccagactttgattattcataaatctgttgagtgcggtaagttgcactattagcgtttaatcttttattgaagcaaactcaggaggctgaaatctatttgctttagcaagcttgttcactgataaaagtatgatgtaaaattttccttttgtgaattcctcagtacaagaacaacacagctgggcacagcacagatcatatttatcttttcattaactaaagtacaagaagatagcatcattggaggcttataagaagggactgctaaagaacagttctcctcctgtttgcatacccacttgagaaaagctttccaaacaagtatttgagatacttgtgagaaaaagctggttgacttgtccaaagaagaccaagtgaatgtatataaagtggttggatttcagataacatttttcccctgagtgtttaggttggttaaatattagaggaggagagataataacactgtttgtcgccataaacttagacatacatcttttttcacaaggttggtatgaaaagctatcaaagattttccatcccagatgatttagtttcaacttggtaaaggacattgtagatggagaaagattgtttggattgtttccaggaacctggaaaatttgtatagagtttatcatagatacaattttttgcttcttgtgaataacgtaataactaattggttgtgtggtgcttatttgcaatgtgcactatacttggccatcaggggacatcttccagaatgaaataagtgacttatggcttatatgtcttaatgtaaattctttaagtgggtgagtaagacaaaattatgggagtcttctcttccttttcctgcatctctggatcatgaggattgtgattattcgtgtttctctagttcctccaacccctggtaaatggaaagcaactgttggactctgaaaaaaaaaatggactatgctaaagatatgttctccttttgtcttttctatcacatcccagtagtattcaggaaggactagggagtatggagaacacagaagggaggcccttttccagtcaaatgtagcattacttcaatcaccttgagctcaactcttgcccagggctgtcaaacataggctaatgttccatcccaggggtgaggttactttattacctactgcccaccccctcagccccacaggtccctttcttaaataaagctagaagcaagtaagggcagctctttcctgcctccatttacctatcgtggtctcattcctgtttccttaggatcatccagcccaactcacttattttatagagaagagacctgaggccatgagatgtaaagagaggttttaaaggccatacggtctatggaaaggcaaaaattagacaccgggtctcaatcaacactttttcaacttctctattatgtctgtgtgagtaacagagaccccaaaaacagtggcttaaaatttaaaagaaatctgaagactggcaggcaactgctggtatggcagccccatgatgttctcaggaaccctggatccttctaacttcctgctgtagtatcgtaaggtgtgaccttcaatctcacattctcaacatggttgcaaatcgtcagccatgctgtgcatgttctaagcaagagaaagctaaagaacaatgaaaatagtgcatgtccataagtcagtcccctttgaggggcttttctggaagtctccacccaatgataactactcattcttaactgaacctagttgcaaggcaatctgggaaatgtagtccattctttctttctcttccctctttttttctttccttccttccttttttccttctctctctctctttccctataatgacctgaataaaattggatctattagtaaggtttaaaaaaaaagaaaaggaattgatattgaataggcaacttcttgtctctgtgcccttatacttcatattaagtaattactttaggatttggaagcataataatatttgacagaagtttttcctttaatagtatgtcctcaaattgccagtattaaagaccaaatgtaatatgggacaagaagtacagattgctttatgtgagtgaaacaatgggagaaagctaagaaactattgtctctgaactgtgttggctctccacgttcagtgagacactggttctattgttgccattggcttggaagtgagcctggaaacaaatactgatgctgacttcacctaggtatgcttcatagatgacaacaaaaatcatttaacgatttagaagtaaatagtttgcttattttgccctgtacgtttaatggttataccattttcaaacacttgaaattgcaacccatgttaagtaacttagaactttgactaacaatagcataattacccaggtcttaatgtggggaagtaactgtactcatacacaactttactaacagatgtgtttatgggcaacaccaaggagaagttacttgcaaatatctcattggtcatgagatttatgatgctgcctggctgtcaatttgtcttttactaaggttagtttccttttttgagttaattccatttatttatggtgatctaaatgtaaaataattatttagagtaggaaattatcaaagtaaaaatcctccttgatgtctgactggcagccatgttgcctcataaataacaccctgtgtgtatagattttgttcttgacaggattcagagtagagaactctgaagacatcaaagagatttcaagaagcaataatgctagaagcctcccacatctggaaatccattaatgttactctgtcccctgagtaaagaatggcttaatagcacagtactgctgcctcgtacctccttgtccactgactaccacactagtactgcagaagggacagaggtcctagcgaagggaaaggattatagagaattagaatctgatatgccacctgcatgagaaaacataggaagtactgggggtagaacacatcctcttgcattagatttctcctaaagcatgtgacttagtatgcgttattaacttattgttttattctcccgcttttagtgttccattgtgctcaaggctggccagtggcctatgggttcccagctctctgatgtcacacactccttcattccaaatctctagcttgaaaagaaccttatgatgacactattcaacttcaatcttccaatgatgacttctatgtcaaatactaaactctctcactattttaaaaatggatatttagaactacaaattagagacaataatcgcagtacatactttagcaaataattgttgcactttcttgctatagagaaggatattgcaaatatattgattttcaagtaatggagtttctttggagcccatctctgtctgcccacacagcaaggtcggtcctctgtctgcattccatcatgcctgcctgccacatcttatcagtgcagagccctatgaagaaggttctatatattagccacaacatgacctatgtggacaagatcatccttagtaattactcactggtggagaagtgatttagaatgaataactcaacaatgccattatttaccatatatcatagccatggataaggttaaaaaaaatcttccttcaaattcgggttgatttatatatcaagaatattggcaactgagctttatctaacttttttttttttctgttttgctgctgcttaagaagatcttagttggtagagatcctgacagttccagttcctgactaatgtaactactcgaagcaacagttagccctgagcacagtccccagccaggatcttggcaagagtccatgggaataatctctttctcttggcagctgcctgaacagcagtttgtggaaaggactgctgtcagttggcaggatgagggtgggtctctacagcacattaattaatgcttactctttaggtagaaagcttcagaaacttgtataaaataaataaattaagacagtatagtatgtggtaatttggacagtgtatttgaagcggagatatgtctcatagttggaaggatgagagggtacaagagaaatggcccctgattatttatttcctaggtatgtcaacttctctgtatctgctttcttacctgattaacaagggtgttggattagaagaattctaaggctcccttccttctagcattctgtggctccatatggactagatagtctcagaaatgcaatatctgcacttgatacttcgcttttttttaattgatttataacactgctacttccacaaagcacttgaggcatcttgcaactaaaataccgatacaataaaaacaaagacatgtacaataagataaatactgagaagtaaaagaagggagaaaacagtatattcaatcaattttgatgaaagctagaagaaagtatagaatctgtctctcagcctcccatcagccaaggcaaaaacaaagatcaacaacaacatcaacaataaaccaccaccaccaatttatggaaaagaaagtagcagcagtgtttattttcccattttggttgttaggttcaattttcccccaggaatttggaagttaagtagtatgtcataacatttggcagagtccacttagatttcaggttttgattctaaggacatacatcctgaacctagaatacctgtcatctgaatctactctgtatggaagtgatcatattcctattctatctactaattagcatcattgtttttcttatttctacatttactttcactactgctctgggccatagtgggttttttttttccttgtggaatacaaaaataattttcatttgttatctttctaccaacatactatataatttgaaatattaaaataaaccagaagtaattttatttaataaatatttcattgacagtttaggatttgtgctcatattttccctacatccccagttccttcatgctaaaacaaaaagaaagacattactatgtaagcaaacaggccctttttagctattataaccaatctttattaacctctgatagtctaattcctatttactttaagacaatgaactcaaaattttattcagtattcactaatgaaattaattgaggcctagaattaccatttcctatttcattcaaccatcctattcataagtaaaataatgtttaaaaatgaactctgtgtgtgtgtgtgtgtgtgtgtgtgcaagtgctctgcgtatgatcaaaagagagagtcacacctaggagttcctgttctgtcaatattcggtggcaggacttaaatatctttcatcttggcagggcgcggtggctcacatctgtaatcccagcactttgggaggccaaggcgggcagatcatgaggtcaggagatcgagaccatcttggctaacacggtgaaaccccgtgtctactaaaaatacaaaagattaaccgagcatggtggcgggcgcctgtagtcccagctactcgggaggctgaggcacgagaatggcgtgaacccgggaggtggagcttgcaatgagtggagattgcgccactgcactccagactgggtgacagagcgagactctgtctcaaaaaaaaaaaaaaaaacatatatatatatatatatatatatatatatatatatatatatatatatatagcatcttgaaaaaaaggcaacaaatagctagtttaagttcagctcattgtttaaggtaattaatgggttttcttgttttggatcaaagaaaagacatgagtaagtgttagggaaagaggcagctgagctgaagtagtgattgtttctcagttccatccccagcccttgcaggggtagcaagcagcctggggcatctttaatgtaactccttgcctcctgtataaaagatgtgcctctgtggcaaaacaaaataaattcattttttcctgtcattgtattaatcacagtaattaatgctagctgcctcaacagataaatctcatggcttcacacaatagtttatgtcttaatcgatgtctaatgctaggtggtggggggctttctccagaaatgagtttgaggacccaggttttcttgtgacactccactgcaataaaaggcttctaagttcaccctgggaggagaagagaataatggagaagaatcacagactctaaagagcccagcctaacgtgacccgtggccttcacctacatttcattggtcaaattccgtcccacgactctctatcagggcaagcagagctggggaatgagatgagtaaatgtaggaattgatacagtatgggaaaatttgagacaactttttcttgatatctgagaagcatcttgtgtaacataaaactgattgcatgaggaattagggagggcttcccagaggagacattttagctgagcttttacatttgagtaagagtttggtcaggaagggcattttaggcgcaaagccttattctcctgttgtgagaatcaaataccaaaatatgtgccagtgttctttgaaattaaggtatattgttattattaaaatgctattggttagcaacagtctttgtccaaaagtggcaaagctttattttaaaaatcaggatgttactattagaagtcagaatgtaagctcattgagagcagctaatttttcttggctcgtgtccattagtttattccaagctcctagattggggcgtggcacagggtagacgttccataaacatttgagcaaattacagaacttgtaaaggactcagtcccactttctttttcctgcaaagactaggggcaattgcttctgttaaaatggcctctttgtagctacagatagcatgttgagtcagtatttagaaaatgaatgtgcctgtctgtacttctgcatttgtaagcataaaaacacacaggtgggcactgcccagcaagtggttaggaccacgggcactgtatcactgacatattcttcttcttttgtcgtcttcttcttcctcttcttcttcttcttttctccttctccttctccttctccttctccttcttcttcttcttgagatggagtttcgctcttgttgctcaggctggagtgcaatggcacgatatcggctcactgcaacctctgcctcctgggttcaagtgattctccttcttcagcctcccgagtagctgggattacaggtgcccgccaccatgcccagctaatttttttgtatttttagtagagacggggtttcaccatgttggccaggctggtcttgaactcctgacctcaggtgatctgtccaccttggcctcccaaagtgctgggattacaggcatgagccactgtgcctgtcccttcttttgtttcttaatctgcatgcacttaagaaaaagataattgtggctaatttatacagaactataaacatctcacatgaatcatttggtatgaggcacaattagtcaataaatatagtgctccatgtattttaaaatctattcccaaataaaaactaaagaaaaataatttagatgtattaataaagaaaaaaatatttttatcttttagaatatcagtttgtcccttacagtaatgtaaaattacatttattttatctttaggatataacatctcaaacagaggctattaacttttacactatgtgtaaagaaacaacttgagaggcaactttattatgcaaccacgatcatgaaggggatgaataaaccaactacttagaaaaaaaagtgctctattatcatggaatggttttcattgttcctttcttgtatttctggaatcactagaactaatctccaatctatgcactgaattttgacatacgataaatgccatgatttcattaatgattaaatacttgtctgaagtataacttttaaatattcagtgatgatattcattgacaagtgacaactaaatctgtttctcctgcctgcaaagaactttagggataaatatttatcctgttttatttctctcagaagctcctatattgacccaaaagtagaaaaatctagattttattccaacatatattatcattctcgacaagtgcagaaactgagaagggagaaaacaaagctcaatgtatggctattttagcagcctttgatcatgttggaatatgggcagtgaacggagactgataaactcatgcagttctttgccataaaggctactttagcgtgaagccaaaaaatgagaggggtaggcttacttttcgcagatttaaccaagaacaatgacaccatttgcaaccacagtgcagagccaaaaaaaaaaaaaaaatcattgcatgcttgccaacatatgctccttagagaataactggaaaatgagaaacgcctgtcagagattaagttctatttctaatgcaagcacaaagcagactgatgtctttttaatgaaaatgaacatattacaacagatgagttttatttgttagttttaatgtaagttctttagaactctggttactgggtatatttttttaaaaaggtaaattttaaaatatgatgagtaagtctagccaattttggcaccaatataactaaagcttttagtggaccaaatgtcagggagtccaatattatctaaaaataaagggacacgaacctattaatacccactaataagaaattaaaattagagattaatgaacatttcccccattttgtacctactttcagtcataatagttaacatttaaatcgttgctctgtgtcagtcactactctaagcactttatatgcattaactcattaatccttcataagaacccattttgcaggggaggaaactgggtcagaaagagattaacaaatttgaccaagatcacacaacaagtgatttgtgaagttgggattcaagcccacactgtcagactccaggggctatagacttactcaacatcaacatatcaccctgctttcagcaaacacattcttcgttgaatgcttttagtcaatatgctctggactcaagtaagccctccaatgagaaagcagaaaatatgtttttttgagacagggtattactctgttgcccaggctggactgtagtggcctaattatggctcactgcagcttgaccttctggggtcctgtgatccacctgcctcagcctcccgagtggctggaactacaggtgtgtgccactgtgtcaggcaaaatttttttttaattatttttttagagatggggtcttgctatgttgcccaggctggtctcaaacacctgggctgaagcaaagtgcttgggctcccaaagtgctggaattacaggtgtgagccactgtgcctggcccagaaaatatttggccagaagaaataaagtatgatcctaatagaatccagaagcgtaagcatagcactaaatgatgcccttaggcctgatcttcaagccagtcatactgtataacgtaagatttgagccggtgtcggtatcttcagacatgtaggaggaagtgatttaactatgaacagttgtaaagtggcagctgttaggacaacccaaattgtttttccaagagaaaacaatccacacttaaaaaaaaaaattgggccctttttctttttgtcctggcttctgtcttggccaccttggccacatagtgttgtctgttaaatataatacaactcattagggcagtccttcattaaaaatggcatcagctctagaaactcactatttaagcttaaaggactacatattcatgatagagtcgagagcctgagatttgggatgcaaaaccatagatgttgtattgtcagtgttcagcatgtgacctgagtctcatctgtaaaacagaaatgctagaaatgaccactttatttggttattttaagagttacatgagattaaacatgtgaatacaatgtgaaggcacttttaactgaacacagataatagtcgatattattaaccttaaatacctccaagtgacttgatgggtgttagggcagtggaggtacttaaaatgtttgtaacaacacttttatttagtgactttgaaaaatacagcctactgatcactctccattcacagaaatttgggatgagtgtatcttcagttttcagacagcgagacataattcctgaagtaagcattatctaaaaggtagaagtcagctgctaactaacaacaatgacacctcagaagcacagaggtcagagaaaggagccaagaagagtttgatgaagggcttagagcaggagtggttactccacagtttaacatggcaattgactcagaatttagaagaacagtaatagaaatactaatggattcatctttttaaaaaaatgaataaaagaaaataacctatgacttgggtaacttgcttcacctcctgggcttcagtttccaaactgtaaaatgaaggttattgcaagtaaataaattccaaaatcacttctagttctaatctctggttttccagatctttctatagttctatagttctttcccaatgtatttgtcatacattttctggaatctactttttctttttctttcttttcctttttttgtgatggagtctttctctgtcacccaggctggagagcagtggcgcgatcttggctcagtgcaacctctgtctcccgggttcaagtgattcttctgcctcgaactcctgagtagctgggattacaggagcgcaccaccagcccagccaatttttgtatttttagtagagatggggtttcgccatgttggtcaggctggtctcaaacccttgacctaaagttatccgcctgccttggcctcccaaagtgctgatattgcgggcatgcgccgccatgcccggctactttttcttacactgcatgttctttgcttgtatttgggggttacactgctatcttgaaatgagatatcaacataggcttctatcaatagttaatatataggttacatctctaaacgaagtggaagcatttatccacaccattacggcagctcctccacagctcacgggttttacttgatggttgaggaaaggccaaattattatgtgcccgatggaaaaaagggaaagaaaaaggtgataaacttatatatccaagttttctctagagaagcaatcacttttgccctccttggctgagttgccatagccccaaagtaggaagaattagaacctaaaaactgtgcaaaaatttcacagaatttggggattttcttcaataagaccttgaataaaaatgtgaagattaaataggtgactagcctcagtctaatactgcatagaataaactgttacaccaacataaatatagagtggtaacaggagattggtcaattttggtagagaatttaagttttaatgccagaaattcaaaattatcctggcagaggagaaggatatgcttaatgttttctggaagacacatgcaaattacctcatctttgaacattccctagaggctattattattattttttatcccattcccaagtattactcacaaagtggaaagggatgaccaatttcttaaaatgctcttgacactctttggtgcttataatgtatatttgtagcctccgctgaaagcttaggtacatgtacaccaatctatttatatttaccttgttttgctcattcttttttcttttaaacatggatattattttaattgaatttttaaaaaactacagtattttcgaaaaaccaacaggattctcatttttggaccacttacaagttgtttttcttacatccatcatctttgtgctgtctgtcttcctggcagcctgccatgaagctgtttctgtttgctcagctctagctttcctattctaaaacttatttcagaagaatcagcatcttgccctctcggaagttaggagatggctctatgcctactctacaatgactgggaccctgggaaattacagctgttggcctcagtttccacatctgaaaaatcatggaaatgggcatatgagaaggtaggagcagggagctagatgtgcccaggcatctttcctgtcctatggctcaggacctctcttcactgaacctttttctactgatgactgagtgtatctactggatccagcttaaaacacgttgatagtaaccaacatccagcatctcccgaaggagatgtgttacctcttggactaactccatcttttgcccacttgaaatctgtgttattgaaggctcatttttattttacgttctcctagtaaaagtcatggccatttagacctttgaaatgactgttagaaataattgatcaaagaatcaaataatatcttggtgctggaaagtgtatcccacagaattatttttacttcaggatgacatatataaccttgaattttaagttcagtagagcaggcaatgtatttatttagagggcagggccattaaggcagactgtttttttttttttcttgtttgaattggaaaaaatggtaatatatcctttacgtcacagtagcaccctagtggttatcatattgcattagttacatgagtttttggggaacattatacagtatatactgcctccagtaaatacaccagtcatgcatacagttacatagccagcgccaggaaatttaggatgacattccctgcaggttagtaattctacccattatttatattggtttgatttgaaactagaggaagctaagtatttttgaagacttttctgacagaattctagaaaaaccagagaatgaatatttaaaataggttaattatctttcaaattttttttgagaacacttaaatttagtcataatgtcaaatcattgagaaaggcaggaaaagagtaaagtacaggcatgtttcatctataacttgaagccattcataaataaaaatctatcttgggtgtatacttaacaaaatgatctttaaaaatggattaaaaaattagtaatgagcctgtgacagagttgctaaagcagatgtggaaattgtggaacatcgtcttggcagttgaagtggcctttccagctggatgtcttcagaaagtgagaatttatgtttaagccacaatacagaagtcagtagtatgtgaagatggttgtcataacagtgcaagattttgatgcaaacacttgatgattgtaaggaacttgaccaataaagtctgtgctgtcataatgaatgaagaccaggttatttgaaacttctaaaatagcatcttacttataatgatgtcaaagtatttcatgcctttaacttatttactttggaaggaaacagaaatataaacaggctgatcaccgagactacccctgagccacacgttttcttttatccaataatctacgtttacctatgttcctcgctatgagagggtccctgtgtctagtgcctaggaaggctaacacaagcacagagaaaaaaatgaagtctccaggttttgttttgtattgttttttaaccagtttagagatggcatatgactaggaaggactgcataggctcctgatttataaaatggatactactcagctcacaaaattggtatattagtgaaatatggtactgtaccggctcggtgtcatggatacttggtggatatcaactctcttttctcttcctcctataagcagtatacttctgtcaattacaaaagtctatgcaagcaatgtgaagagatagtaactgagtaactttgggcaaattatctaaacctgaaggaattggattattgggaatgtcaaacaggtttcagtgtttgtgcatcctttcctttggtagatctctgatcctttagaatattttggaagtggtggccatgctccatggtcggctagcagcagttcaagctatgcattaagcagaagaagagccttcatggatcctgtttttgctgttgctagaaccagataaactccaacaccacttctatatctatcatcctgcccttctgtttgtaccattgattagttctctgtccacttctaactttgattattgccctaaaattctaagatttttggaatgttttccagattttttctcatttcttcatgaaaattgaaagaaatatctttttcctttttataccttattttaggggttatctgagagtaatattatctcatttgtcatgaacagaacttgttgaaaacaatgtcaaatatttaacatgaaagtttaggaaattataattcaacgtgcattcctgttacaagaaacataaaatgtacagaaactgtggtttttccccctgagaaaatggtttgttaagatagtaaaaatcactagaatgtaagcttcaagatgacatgaacttttgtcataaagagtgcctgtaacaaagtaggtgctcactagcatttgttgaatgaatgaatgagtgtctgctgccttaggtagaagagattcttggaccatttcttggcttgagaatctcagagaacagggctagagcaaaagctgaaagtcagttctcaggtttagggaccaactctgttgatatccattcatgggatttcactcatgaaaggaatgtggatgtgctacttggatgtgctagactgactccctacgacatagatttcaacctttattttgcttcccaatgacatcttctggttgattatagatgttaatgccaagattttcacatcccgtccaaacaatatgctaagtcttataacagaatgtaccctggtgcccatgggaactcagaagagagaatttcaagtcattttttaaaagggcatcacatgattgttaggagaaataactaatacaagtggttttgacaagaaattcttaaatatttcataggaataacagtgtcattattctttggatcatcatgatatgagtcatcaattatgctattggattcaattcaatttaatctaataagaatgaaatgagcacccacttcaagcctagatgtgttaaatgtagttggggtacaaagaagtataaatatgattagggtagatcatttcattactcttttgttagggttccttttctaaatgcatttatgttgactttatatgatggcatgaaattgtgttaagccattataaaaattatcattgttttccttttctttctggggaaaaaagtgttctgcaaatatatacattcaaaaaatcatatgaagtatatatagatgtatctcataagtatgtatttattctgatacatgtgtcttattcagaagcatgtatcttatacttttcattctgaagcttgcatcttattttcagaataaatatataatacataaatacatgtgctccttactgataaatatataactctaaggtcatggtaattaatatgttttctattgctgtgtattcaaaacaacttttaggaaaagaagtcgaatagctcaagaaaaaaaaaaaaagaactaaacagcagtggcttgttttacaaatgggtttgctgagaattcctttagttacacgctagagatatttcttgatccctttgttggtcagcattagtgaagttcattacattagatttaaattatgtcagtcactgtctaggtgcagacagattcagaaaggcatattgtaaaaatatagtgagcattgttgctatttccaaccaaattcaatcttttggtgttggattaacctattgtattcatgttcacatttatttatgcttggcagaattcaacttcctgttttccagaggaagctaagaactcctaattttaaaaaatagctaaaaatccagagctttaagactcacaaggcttttgaatgtcaaatggatcttatagaaaaatatttgatgagttaagtattaaagaataagaaacatatgggttaaattttactgaaatgcacatgggcttaagaattaaggaagaaaggacttggcaaaatatggttttggttttgccaaatccaaagtttgagaatagagtaagatattgaacaaacccaaaccatatctggctttagccatctgctagcctgttgtctacaaaagccttttgatggggctttgcctttctaaaaccactgatgacacctgaattcgacatgtggtgtcctttagtgcctctgtgggctggctagcctgaccgcataaacttgtagttccatattctaacaggtttggtgtgtcagatttcccagtaaaagtgtagacttttactaatgaaacaattagcctaagacttgattgcatttttaattcaatagatgtcacatttaaatatatagatacaatatttatataagtataaattatttttataaatatttgttatatataaaataaaatatttgaatgctactatagttaactattttactatattatcatagaactttattaatatgaatatgtacttggtcatatcccataaatctccgttttctaacctaccagaacacactttctgttcttctttttggatgctgaggatttttatcttttattatgcttatctaaatgcatatcttctcccccatctcaaatttaaagctcattttgtgaagaatttttgtttgatttatactcctatttgtcaaagatatctaggctagtatatataaataaataactttacattaaagttgctgcatgtattgatattttacaaaacattttaatagacagagttttaaaatgaactcttatatcatcttgcccagagccatctctcctaaattttttgtacatttatgatagtgtaattttacatttgattcgattgaaatgaccttctatccacctctgatcaaaaacagtttatataaatttccaacaccataacctcaataaaataaatgtacatctaaaaactatacaatgggtatagaatacatgtttgtattatctgtatattacattgtaatatatggtttggattatcttttttccacctatttctttaaaagcaatgcagcaatagattcctattctgagtagtcagaactgccctgaaacacattcacacttccacagtcgacggggcttttaataaatgaacaccacttcactttgcaagcagtagtgtgatgtgcctacattttaattatacacatattccaaagttccaagtctctctgtagtgcggtccacatttcatgctggagacacttggccaagactgaattcatatgtcctacagggttacatatgatgtggctcctctcccactgggttacacaggatatgagctgggtcctggcggcttctgaatcaagaataagagaagctcttgtggtgtgaatttaaagagagaaaaagcctgtctctggcattcaagtcgctggaagtttggcatgtctagctgggagtagacttcggctcacagaactgagagataactaaacaaagatttgttcaatttgataaaccccctagcaaagaccaccttgccaactttctttctaaagaaacttttcacagctgaactataaaaccttgaaaatcaaggatttgtaatggaaatgctgacagatccaactaactcaaacttgtaccaaccaagcattgctatcatattttataactgtttgagaagtttatagaaaggaatgatacatttgcttcatgggatccatttcctttgctaaaaactaccaaatgtccccagagtagactccttcactcttagaactttcttgatactcttttcttaagaatagaaatgttaaaattgctaacttctcctgaggcttgaaagcaactgttgcctcatcctgtattcttgttttacacttgatgaagaaaattcagacactgccatcggtgcttcagtgtttattagttatgcattcttgaaaacctgttcaacattttagcaaatttaccaaaattatcgtagagatgaatcttctttgtgagttttgaacaagtggaaacatttactctattctcaaaatgctggccagaaagtgaaagaaaacttaaatgcaaaaagttaccatcatcttaagggtggtgtaatctttgtacagatatgtaaatacaaatttccatttatacctttttttgaattcatactgcttttttgttaatccttaaatttcagttagttggccatagttcatgcatactcaaattgaatttcatcaaaaatcatggttaacaaccacaggaataattaggaaataattactcacagacataataaactacagtgttacttattcccctacaataacggagagttgacatttgaatttctgagaaggtttaaatatattttacatgctagaaaaatctgatgggtataattttctctaatattaacgagtgagacatgattgctcgagaaacaagagaaaagctggttggtcaaacatatgccttttgtttctacattttgcataaaggtcttcacttggtatgcgggttcctcagcagaaaggagaagttacagttaacaaattaatgaaaaccaagtgatgcctttgaagaattcttaagtgaaccttaaccagtgccttgggctacatgttcaatgcgaacaaaaaaattaaggtgaactggccactgctactaagagtcaattgacagaatgcatgggtcattaattttgtgtcctttgttttgtcagtgtgttttcgtgaggcctggtaaagaaagtaaaaccactgatgctgaaaattgtctgctctgtagctcatttcccctcccagcatgcactgacccaagggagtgggcttcaggtcgccagcccccatttccctttcaaacactcccgcctcctgcaagtttgagaacggatccattgggttggtggagtggttaattctttgcaagtttgtgcttaatcatatgcagaatgtaagtaccaataaaaatgagatgtctgctcacaacgtttccttgtatttaaaaaagattctgaaacagcttctgcaacctcggttcctttcaattatagcagaggagagtgtgaaatttaaattggttggttcatcttaattctctgttgtttcattaccagtaacccctgagggccaccttttggatttttgtaccatgaatgagtgatgtaactataaaatgcccataatactggggtggcatgctagaactctatttggctttaaactgtgttctaagccattgtgcccaaaatgttattgctcatcaacaattccataattccatatcaaggcaatctagactgtatcacatttgattaccacgaaattttatttaaaaacagattttttaaggatcaatgttttaaaaagctggctaccctatcaggctaacttctcgactctcagcaagacttttgcagtcttcaaagtggaaaggatgcaactggcctgaattagagtaacaatacctctgccttggaccgggagccaaggaagatttgcagatcttaggcaaacactatttgtaggtttagttgatagcagtccagaaatcatagaattgtgtgttgttctgtctttttctttgaatatttatcagcagcactaggttgtggcactagatgtcaagtctagggatgatttggatgcaatcagaaatggttcagttatggtagcttcccttccatttattccttcatttgacttggtagccatttaggtgtttattggttcattcattcattcgcccactcgttcaacaatcacgcaaagcacatgataggtgctaggttagacaaagataaattagataattcctagcctaagaaatcggttttgtgggccatcagacatgtaaataaatacaatatactgtagagtatgctggaaggtagggcatttgggtgagattgagagcctggaaccctgcctataaatgggatggagagatgaacgtacttgtaatagtttactagggctgtcccaacagagtaccacagactgagtgacttaagcaacagaaatacatttccttacaattccggggcccagaagtctaagatcaaggcattggcaggcttggtttcttctgaggcctctctccttggcttgcagatctctacctacttactatgccctacttacatgatctttcctctgagcatgcatgcctctggtgtctctttgtgtttccaacatttctcttcttagaagtacgctaatcagattagattatggcccacgataacagctcattttaactaatacttgtaggtcctatctccaaatatggtcatattctcaggcattgggtgttagggctttaatatatgaggacataatcttgggtaccataacagtacccaaagaatagtactcaaagaagagatgaatagagagatgtcaaattgacagacaacaaaagggtattcctagaacagtgcctagaaatgcatccctgaacatgttataccatgtatagagacttagactaagaatttgtgcaatacaaactaagaggtagatttagcagttttccattttatttgatgattaagcatctactatctgcaaatcactgagttgagctttgctttaggaggacacaaggaagtagcgaaaacaaatcatttaggggccaccaatctgctgaatttctatatcttcatcacaggttttcaattctagctacacattataattatcctcatagattcagattaattggtttggagtgattttcccaagtaattgtaatgcaattctaataatattgtcaagtttagaattacttgaaacttctaaatacatacataataaaaatagttaacatattgtttttaccctgtgccaggtgctatcctaaatacttaaacacatgattttatttaatcttcacaacctatctatgacataagtattatgataattctcattttagagatgaagaaatggagcagctatgtaggttcactgggcaaaagtcagctagttggtatcatattgacccaaatttcaggtttaactgaattctatcacatttttaacaaagtaatttagagaaatttttgtgcagacagtcttaatgtccaaagattctgtttaaatatatgtcaataaaattgtattttttagaaaatttctcagtgccaaaagtatgacagcatatccatcacattttagggattgtgggataagcatgtagtgagtgtttaataaatagttattgtctaaattgctataaattttagaaattgtttcaagaaacttgaaatgcaattacatcattgcattaaaaggctttattaatccttgaataaaagtattagaggcctggtacagtggctcacgcctgtaatcccagcactttgggaggccgaggcgggtagatcacctgaggtcgggagttcaagaccagcctgacccacatggagaaaccctgtctctactaaaaatacaaaattagccagggtggtggcgcatgccagtaatcccagctgctcaggaggctgaagcaggagaatcacttgaacgcgggaggtggaggttgtggtgagctgatatcgtgccattacactccagcctgggcaacaagagtgaaactccatctcaaaaaaaaagaaaaaaaaaagtattaggtggatggttagcttttttgtttttcctttacaaggatctctttttattctatatttttcataggtttattcatgtttttaaataatactgaatgatagtaattattatatacagtgagtagtttttccatgatagggttatacaaaaagtttcagaggttttttgcaacacagaaggtttaataataaagatacggttgtaattgttatttaccaatatgttgtgatggtataatattatatattttactaatatgtaaaaatggtctataccttaaaaaaatctctttaaataataggctattgccagagaattgggtgtatgtttcataatattattcataggccctggagctggcacacaaataaagacccaatccattgtctttcatagaatgatattgcttaaagcaaagaacagcagacataaggaacaaatacatgagaggagaggtaaatacataaaaactgtatgtgggccaggcgcagtggctcacacctgtaatccagcactttgggaggccaaggcgggcggatcatgaggtcaggagttccagaccagcctggacaacagagtaaaaccctgtctctactaaaaatacaaaaattagctgggcatggtggcacgcgcctgtagtgccagctactcggaggcaggagaatagcttgaacctgggaggcagaggttgcagtgagctgagatcgtgccaccgcactccagcctgggtgacatagtgagactccgtctcaaaaaaaaaaaaaaaaaaagtgtatgtgtactgtttcagttgatagatgagataatctaattaacttttatcaagatatgataagatttaacttatttcaaagcctgatagtcttgtgtactgcatcttagcaaagtgatctcatgatagttgtggtttgggatgtacctagtgacacatcaggcaggtgtcatctgctagataagggcttgggaaggatgtgcaaatatagtcttcctgctagagattgccagccaccttactgacccaatgttgtatttatgcagcttacagtgtgttttttaagagaataaaataacttgttcaattgccttcataatctatcaaacactgttttgtttatctgataatgcttttagtattatcataatattattatagtagttctaatttttgttttctaattaggctcaaatattcccctatgatatggattacctttggaaaacatcatattttaattgcatggttgcttaatatctgtaaatcagaatcagggtcaatatctaagaatgtcccattaactctaaagagaaatgctcacttttatttggaaaaaaaaggcttggcagacaagctgggaactaccagatggaggaggctgtgccacatagattataagtttttccctctcttcttattgatgtcttaagttgaacatgttccatctgtccactctcagtaatgaatagcgacttttttattgtaaaggtaacacattccatatagggtaaattaattcaagcatataatgaaatgtgcaagactcaatgctctgtactgcgtagaatttgaggattatgtagggaagtgtggaaatccaatactatttctataacagagcatatttttacttggagagggcattagaaacattctctcctaagacctctcagttttgttctccactagggtctaaaagtctgagtgataggttgtagaaattgtttgaatctgatgaattttttaaaaaaattattagttctataaaaatgattatttaaaactaattaattttctaccacccacagtaaagtactttgctagcacactagtaaacaattgaaaagcactaagccacctttttaatgtgttgactatgtctaaatccagcttgtcaaatataatatgaagataatgtttttaaatttctttattcaaagctttggcttttttaaagctaatgtctctggtttgaatttttcttctatcttgtggcaaggatggtggcttttcaacatttaaccctagcgtggctgttctgttgtttttcgcatatttcattattgatacttctattaataatattatatttcccctttataatgataacaacaaatactatttatgttttgcatatttcaaattgtttgggtagggctaaatcttcattctgtctctccataaatgggcacccagaacacttccaaaggaaaaccaataaaggagtcatatgattcttttattgttaaaacaggattaaaatttaagcagctgcttggcctggttactatatctatttttaaagccttcgtttttttgctgttgtttgtttttgtttttttgtgtgtgatggagtgaggttgttgtatgtatcaactgtttgtgtcaataagctttgaaatgctaactccttaaatagtttaagacacttggctttaatttttggtgtggcaatcttctctttctgtgactagattttacttgttgatctctctgaaatctggagttggaagttactatttctttgcttacagataattgaagccgaccaaacttgttaaagtcaaaaccaacaacaccatgctttagtacacgcctctgggtttagtcacagactctggtaggttctgcaaatggcacaatttatgcggtggcatgtcagaaacttaatgctgtaattttcctcttcctaatggagaattaagaatctaaagggtctgggctgttcacatggaccgaatccccacagcttgggtgcagaggtctctcaaaaatttagtaagtgagaaggagaacaaagattcttagttggaggggaaaaaaattagatcgcctgtggctgagaagctgagggggacaggtaggcacagtggggtgcaggataatgaggcacatggcaaatgtgatgcacagatgttaagccaactgtagctccggctcccaaacttgtgcatgccacagcaccatgcctcggggctatgtctacaccagaacatttgcagcagtaaacgacggcaacattaggttcaaattaatctattactccagagctgtgaaatgttggttgcttgtttcagaattacattgcctgtgggtgaaatgttttaggtagattttaatgcaagctcatggctttctgaggagattaagaggagaaagggaaattagaacagttaggagagttgtggaggggcacatttctggttaaagtatatgaaaaagtattacatatttcacgggcaggtctggtctcctgttggccacctgctgggactgaaatatcccacatcataatgaaggcaggtttgcagaagccttgtaaatacttgagccctgcaattgaagaaggcagacaaagggggctttggggtctcctggagacttttgagggttaggcctgtcaggcgagtgctccaaatgaatttggtaatttattattctgcacttgtttagtggaacatgtaaaattttgcatttaggtttttaccctcatgagtttaagtaaactccggagtaacaggtagccatgtgacgtttcagagtatgtttcgaagtaatcctgttctccctctgcccattctttcactgatattggcaggttcattttcacaaacctgtctgggactcaaacgctctattttttccaaagtggaaaaaccaaactttgaattaacctggatttttttggtcaattaaatagtttattcaatcagacgggggaaaaaacctgtttggaagtatctataaagaattttttttaacaatattgtcgtttttcttataaaaacacttaattgaaatgcctaagagctgcccagcacaaaagtcaataaaaaccctagaatagagtttataggggttgtctatgtacataattaaatccttcaggcactttaaaactctgcaaaataaatggttatgcaagaatagcctgctgagagaagaaatgcttgtatcagctttaaccagctgccctgtgttccatgtttctgggttggaatgagaaagctattagaacactggaagactgcaagccacatacaaatcatctttgttactgacacttgggggagtactttatagtggctgtcaagaccaatacaaaacatggtttgtgcctgaaaaagtcaagtgccattattcaaaaagaagatgttagtaatccaaataactgaacaacatccaggatcttcattgagtttagctgctatagacgcagatttattattgagtctgacttaagtaaattagcatgtaggtttgcattctagatttgatggaataacaaaggttaattacttgcaatgatctatgctggaataggagtaaaaggggagagctatatttagatttaatttcaccattcttaagggaatactatgtgaggggacgggattattatagggggcaaaggaaggagtgctaaggaaaagaaaaaaaaaaaaaagcaagcagtctaatgaatgtaaccaatagaaaaattgtaggtttgtttctctccctggccctcaaagttatgataaatgatagcacaaggaaaagataacctaccatgagagtaggatcaccaaggccaaatactaaaactcccagctgactggcccatacactgcagcctctgttcgtgtttattttttctgctcactcttggtttcgtcaatcagtatgatagacgataagtcctgactagagcagcccgcgtcctgctctctcacggtgggtagcatgttgtggttggcgccgagcagtcggaggatcgcccgcatcaggagcaccaaggggatgaggttcggagcagtcttccagcagccggctccttggagaatagcaggcaggagcgttatcagcggagagtggagttgccaagaaactgaccacacattagtagctttgtttgggtagagtctaagggggctgtagctcatagacttgagacactttctgttaaatcatccctggatttaagtgttaaaagaaagcttgttcaaaaagaaaccaggactgattgccgcaggcagtcctgtgacaggactctcaggattgagagtcaggaatttgtggagttgctgtgctgagatgcaaatggacatcaatttaaaaagaagaaaaagaagaaggctcctctcgtggtctaccatttacttctaaattaactatctcctaatgtgtaaaacggcattaaaagtgcctttaaaagaaatctataaacacaatggggagctttagttagctggtgacatatgaaacactgctcagttagccgacagatcatcagatagatggaatttcctgaatgctattcacagatcactaatgttgtttatctactctcagcactaatactttttacatttcattctaggagaagatttttactttatttcatgtatcaaaacttctagaaaaattttaatatcaccaattttttggaaaccttattttgtagaagcttaaagactataaagaaaattaaaaatgtcctgacttgattcgctgaagtagccaaagtgaaattcttttgatatcttgtgatgcaacattggtcaaacatttcctgttcaacatttctttcctgggtattagtggttcctttctcaagaacaaatgctttggaaatctggtgctctgtataattacaagaaatttcaaataagtgatcagtacactttccccaaaagtaatgcttcttgatagagtaaggtaaacttgacagttctttttgtgtagataatttttctccattttagaaattacactaatgtgtgaaggaatgtttccccctagcttaaggtacattccataaacaaaatgaatagtttcggattctctttatacctggtgttattgtaactgctgatgtatgttaaggtgaaatttaacactggaatattagttttatttcagttaattatgtttctaagagctcatgaaccctaagatttagggttggtctgtttctagttatcctgccaagttttttacttgatggagggggtctgtttcattctgcttggcctctccacctttgtaacccctggtttcctcttttcctgaatcacaaatttacgttctccccttctgtgagaagattgaacgcttattcaactccaaaatgactatggtcacaaaatatcaacagtgatttttaatagatctttgcctatcaaaatattgttgcttaataatagggtaaaggtagttgtggctgctgataggaaggaatctgactattaataaaaagcagacaagggtcttgaaacagtacttccactgttgcaatgtagacactttatattactttatttagtgcaacacctgcagctactcacattgctggtggctgaaataatccaggtccacacggagagggcattacaatttcattgtgctgtttgtgcttactgtttaagcctttctcacaggagaaagcattagctaagtgtacagtagataataaaaagggggatttgggctcatctgttccccttaaatctgtctaataaaatctctcctcataattagtatctgactccttttctaccactggctggcatctagaggcaggtagaggcacaaaatggcatttgttttttagttgtcccatttcatgactttatggatcatcccctctttgagccttcatgacctaagttctgagacttaggaaactgtatacttcctaagattctcttctgcagaagttataatagatttcagatggaagatgtttgggatctcaacaggacaaagaggacacatcattttaaggcaataataacaagccattcttcatccttaattgacaacttaatttagattttagacgagtcccttttagtgatgtcctattttaatttcaaccccaaatgctgataatcatgaattcaaaaacacagtctataaaaagttccatcaaatgaattttggtttaggcatgaagatttagggtgggggttggggaatgaggctgaaacccagctagaggtcatttcttcctcatctatgctggaacagctcagagttcaggggattcatactcttttgactttaattgctctggggccactgaggcaaagcaatggtgctgtatttgtctgggggtcaaagaagcaatcacaaaggtcttcagaatattttcaaacatttgggggagatagatggtattcagacattctataatcataaaaccagtttctagatagttgtcgaatttcctaaactacacttgctgaagtttatttggttattgaaacatttagcttaaccagtcatgttctttctactttatgaaaatgtagacaggaaattatcagcaaattgctcgtttagaattaaagacaggaaatgaacttcagcagttgaattcttgtagtaaaaagcttctacaactaaagcataagtaaagccagcaaaccttttatttttaagtctgggctttgttatatcaacacaatggaattaggtactctgtcctatttcgcctcaaagtttccatattgctttttacagcatctacaactgtttctgttactaatttccttgtaatttttaaaatgtaactgaggtttctattctttacttatttagaaaaaaatacaatttcttggattacattaatagattaatgtaggatatgacacagaaatggtaagcttgctagtttatttattaggacaccccccaaaataaatatctttttaagttctcatattattttcatctggaagtctagaactttttatttgaatctcaattataatatattttaacttatatttctaaatagttaataggtttcccttgatgtgaacttttcaagccatttctttttgatagctattacttagattttattcttaatatattatattgttagtatgtccaatatatcagtggtatctacaaaataattcctgtatttaattttcttttatatttttgttgccatttttatttctccatatatttcaaatactctaatattctttaaagttctccttattggtattacattatttaaataaaccacaagcataattctcctccaacaaaatgatttgtaccatatctgactattttgattacctttaagaaaaaaggattaaacaagaaagaacctcaagctttagccaaactgaacaatttactcaactttgcttgaggacgtcagaaaattagggttttgtgattaatttaaaatttacttttatagcagttcacatgtaacatatctttaagtattttggaacccataaaaagcaagaattattctgcatttcaaaaaatatatagtgttaatctattattatcgattctcattatgatgaagatgtgatacattcaggtaagatttaaataagtatgagacattctaggtttattggtattagcattttataggattaatcataatacatattttgtgtaagttagtttataatcttttgttaactgactaaatagtggatgtatatattcatagtggtttttctaccaccattttgaaagtgaaaactcacttttaatttaatattcaaactgaaatttccttagttgaattctataagagatcttaagagaaagtggactttctaatcagatttgtttatctgaatcagctttatgccttatgcaaacttttataagagagtccaggggatattttagctaaacctttggaagatattgcctccaaattgttttatttagtaataattttattcaatggtttgttcgtggggtttttttggtttggttttatggttcctgtttgagtcttccttacattaatctgaagggcttgtaaattttagcttgcctatgcctaagagtaaaattgctgtggtcatttcaggtagcaaaacatcaaacttgatgctctctcatgtttcagtaactcttcgcatgttcctgtgaatttaaaccagtttcctagtatatgagttcatacatctactgaaagaaacatgactatattcaaattagcatgaggtttgacttaaatcatgctacagctggcatttgtgggctaattatcaacatttgttaatctgagagtttttgaggatgtctttgattttgtcagaaaaaataatttcttttttcttttttcttttttttttttttttgagatggagtctagctccatcacccaggctggagtgcagtggcatgatctcagctcactccaacctttgccccctgggttcaagcgattctcctgcctcagcctccagactagctggaattacaggcacctaccaccacacccagctaatttttgtagttttagtagagatggagtttcaccatgctggccaggctggtcttgaactccttacctcgtgatccacctgcctggacttcccaaattgctgggattacaggtgtgagccaacctgcctgcaccaaaaataatttcttaatagtaaagagtaagaaaatttgtgaagttaagtaccaatatagaaaaatccaggataaattttaaatggttaaatagtatgggacttctaaaaaatgggtgaactatataactttaaagttagctagtatatttactttagatttttgctctggtgttcaggtatgcagtgatttttgggaagcatagtcattcttttattcagtcaacaaatatgttcatttaacaacagtaagtgccacatttttttttttttttttttttttttgtgatggagacattgcagttagcacagcagaaatatgtgtcgccctcatgaagcatgcattctagtagggagggacagcacatcaataaaggaagattatttcatacggggacaagttctataaaaataataaaactgtagtggagaatgagtgactaagggtggtcagttagctcttaaaataacaattttatattgaatactatagtgagttacacaatctttatctgagtgaaatcctttggtacttattcagacaagagttctgactctcatgcttgaggataagattttacatttcagtattacattgaagatgtttcatttttaaccagactaacttagtatattgttatttttaatgtgaccaaagaaatattttcatagaagctaatgctgagtcttttgataatttgccgtatcttagtcaatcccaaaaaatttattttctactatttacatattatcctagtggatattacattacttactgaagcctttggttctatgtttcatctactcagacttaattcaggaagagcttcatccagatgttttgtttatttgtttctcgattacatgtatgagatttcagaatttatgagatcataggtcaagtgaaaggtcacagttgagaggtcaagtaagaagctaaaatttgtgaaaccaaagaaatgacaggacagtgccaaatgaaaggtcaaaagtcaagtgacagactcagtacagatgaaagcaagtggtgagtttgttgaatgtctgagcacgttgaagtgtctcaatagtcatgcacacaaagtcaaaggttcttaaccttggaattcacaattaataataacgtgccacttgttattgtataaatatatgttacttattcacagagaaaagcatctattacatacagtcaaagagtcttttcattcattgattatcattaatcagggtgacccttttttgatgacggctcttcgaggtgtatacaaaacatccaaatttgggaaatcctaactaggcttttctttttgtcagatgcatgaaatatacacaatatacacatggcagatcatgtgaggtgttaaaaacttacttaaaaattagagaatagattttttctcttacagacttcacattgataccctatctggttttatgtctccccttattcatttatgtattcatttactcatgtttagcaaatattaattaaaaaccacgtcatttttagttacttctattgcaacactcgaagagaaagtttacttatgagaaagagttgctttttgaaatatcatggtgggggcatcctttccaagttttatgtgctggatagtacagatgcttctccacttaagatgggtttatgttccaataagccctttataagttgaaagcataaataaaaaatgcatttactgcaccaaacctactgaatatcctagcttagcctaacctaccttaaatgtgctcaggacacttacatttgcctgcagttggacaaaatcatctggcaacacagtacactatagaccatcagtgcccttgtgatcatgtggctgactggaggctgtggctggctggtgctgccctgtaccacatatagctagcccagcaaaagatcagaattcaaaaaaatccagtttctactgaatgcgtgtctttctggaccattataaagtaaaaaaaaaggttgtaagttgaatcatataagtcaaggagcgtctgtccctttttttttttttttaagcaaaatggtttgattccaggacctatgatttgggagatagtaattatttgtcatttggggaactaagagaatgaaaacataagcgatccttgttttacataaatatgatattattgctattatgttatcttttttgtgtgtgcgaagaaaattactttttcctctgccctagtaacagagaaacagggaagtctgtagttctaatttagatatgttttcatttatccatagagtctatcactttaattttaaagaataagaaatatcatttatttggttatttttcattcctcaaaaattttacttttttattatttattcctccttttttatttttcaggaatagtaaacacgttttcatatgtgagaggtgtgtgtgtgtatgcatgtgcatttgtcattaacaataaatggttctttgggacttagggacattttgtcagtgatttgctttatggatcatacaaagtgaccattcttcaaaagccaagcatttaaaggaagtctctttccatattctagaaataaacagcaacatttcatgacaaactaaaaaaaaatgaatgataggttagggatctccagctctaaaaagaggaattcaacaaaagagaatttgcttttatgtagagtcctgtgctttttttctcatagagcacattagaatggtttatttacaagtaaaaatcacattgatgataatagaagtcagtggcaagtcaataagagtttagtctctaccaaactataaaattggacttttaaatcatagcgtaagcactgtcgttgtccaaaagaagtgtttatttttcctaagttttgcctttcatatcacgcccataaattttttcaaatatatactttgaaaagctaagggcaagccctgaagggtgaaatattgcaaaccaattaaaaacaactgaagtgagattctaaaatacaggagttttccaactcatgaacaatatttagagagctggttaattttaattcctctgggaaccataagtctgggcattaataggcttagagtgataaaaacagcaatatactatgcacatatagatggtattgtcaaaaaaagaagcaattagtggcaaagaaagcataagtatgtacacatatggtgagcaggttgacatgtaaaatatatggccaggaataacagccaatgacaaaagagaagtggaagctgggctactgttttaacttacacaatagcaaataaatgatttgcacacaaacacatcactctagccatctcaaattattgaaggctctttagtaagtttaccagattttttttaaatcagctaaaaatctataatacatggctattcctttcctttttcttttttcccttctttcttttttcttttatttcccttttcttccctttttttaaattgcttttatatgtctcccttatctctagtcttctttctctttccatcatttgctcaatgacataattgactaaatggatggttcaattcaatctgcttaacttaaaagtactgaagaatcttgatagaacctaaaatactgatttttttcaatcaaagaaagcaccagagaaaggggccaactgacccttgctatcgttctcagtggtcatcgcttgaatggcacagagtacctctgtgggggtgggcagaaactcaccttttcagccttttcaggtctgtttctattctttccatggtaggaattgtgtgtccactccaaaaaatctgtctcatatttctctttgaataaaattataccataaacatttctataagaagttgacctgaagggacacatttacatttcactttttaaaagttatacagctgtcactataaaatgtaacaggcatattgtaaccgtatctactatgttatagactttgtgtcactttcaagtaaaataagtggttatggaaaggtaattcatttaaaaaactgataagcagcaacatatattttactcctccatagtcaggaaattgggagacatgcacaggttcatttccagcatgaaaatcatgttactgtgacgaatttaggtgcagcatgctctttacaatggaaagtactgtagtatggaataaacagtaataattttagtagtattctccatcttaaccctgtttattttggctatggttcttttttgggatgtcatctttcccaaaacccaattgctaaaagctggtttcactggcagagaaataaaaaagacagtcgagtgagctttagagagtgctgcaattagttgtgtgtgtatggaactgcttatctgcgcacaactgggtctaaggaaactctgcttagtatttattaggagttgaatttatatgagaaaaaaacagatgctcaattttgctacctttccttttaaagtttaatgtgctgtaaaatacaaggatctgtacaattaaaaagaaggtgctttaccctttaacatgtgccaaacgtctttcacccccattttactgcatatacctcctgtttctacaaagcacccaagaagtagttcatccccagatgacatttctgataccgcatgacccagattgccacaatttgggtgaaatagcctgaagaattatcaaataagatagctaggatgatgttctgtattctctggtgttggtacagcaccatgtttgggacccaggtattctaaagagaatccttcaaaggcagttccaggctgccccacaataattgaaacataggaaaaccagtatcagacgtcactatctttcttttggatttgaaaacaggaaatgacttggcatttctaatcctgactgggagacaggccctgactccacaattatagagcataattactccaagctcggtctacgaagaacccccaactgcttgttggggacctgccaggaaactgacctgggtgaatggtctggaagagaacatgaggtgacaagaggctgagatgccattttcaagtaaatatacatgaaaaggctgcttataaaggtagaggttgttaaaatcagcttggcactagagtttaagctgagaaaaactggcaacatacagtgtttggggcctgaatcaaatattcactgaagctttgaatggtgtggttaaaaagaatattttcaagaattttactttaaaaaattctcattttcaaactgcaccacaagcatagtttacatgctgcctcttaaaaatatgtgtatacatatatatatatatatattttacaaatggttactggattcctatgtaaaatggggccatagtgtcttatactccctctgcaactcatttcttcctgtaaacatgtaactctttgttggtgtttctgatgttactctctccaaattcacagctcgctgtgattcctatgccagttgcaatacataagttctttgatgtgtctcccttccctgccttttttttttcttttttaagattaacctttcagctattaaattgattcctaacaaaagctttttttgtggtttgcttatatcatgcttggaagaacagcaaataataggtaacagtggtggagctggaaatttttaaaagacatgattcttgggtccaagtcgtttttcacttttgttgtagaatggcctcaaaatggtaatttttggtatgatcttttagaaagcccaccagagtttagaatatctcaaaaaggtgaatttaagagaaacgtgagaaattcacagaaccataggactaaatgccttctcacgtgatcagaaaggagaaaaggctttggaagttccttagagtttctagctgtgctggccagttattctggcctaatgcattggggtggggcaatgggtaccattcatgatggtgttgggctgcttagaacttgtacaagaatggcttaaagtgacatcatccagtctcaaatgtttgatgctgaaaagactcaggactaacagcttagaaggtaaaagcccctactgctaaactttgggacactgtcttaactggaccaagtatataggatctgtagatacatttgcatattacttcattaaacaatgaattagaaaatcttgagaacttgctttaagaaataatattcactttttttttttttctggtcatgggaccatgtatgatttgtcttccacctcctgatattcccctcactcacttcatgacttcatcatactggtttctattctgttcctcaaagatttctcttcctggggtgcttctccctagctttttgtgtggaagactcattctcatcttttgggtcttggctcaaatatcatttcctcagtagggacttctctgactacagctgttttctctgactacagctgactatagctgtctgaagtttcctacttctttttctcctaatttcatcatcctattttttaaaaatgtccttcatctcactcaccataggttgtaagtaacttgttagtttatttacatttacttgttatgatgtgcctctcccttcttgtcctgccagaatataagttcctgaaagtcaagaaacttgtgagtcttgtagacttccttatccccagtatttagcctggtgtctggtgcaagtaggtgttgaataaatgttttatgggtgaatgaatgcatgaatgaaaaagtgaataaatgaaagaatgaacaacatgtttactttatgcatgcactacatttgagaagcttccaattttattcaatagacacaacaaaaggaaaaacagaaaaagactacaattgtaagaaattggagagatcaagactatagatgcaataacatccagaattgtcaaagattttatttccaccaagaatattttgggaatcttttgtagagggcatgcttcttatgatgaatgaaggatgagagaagagagagtatttaaacaaacgtctatgaatggcaagttaataaaagtgaaagttaaaaagacaatatattttctatttgtgttgttattttgataataacaaagttatgataaagtgggggaaccattgaagatcttatgtgaggggaatgggggcaagataaacaattctgtatgttgcggcaactattcttctccattgtgaaagtgaaccaatgattgaccttcaaaatgaccatctaggaaatttaaaaattgaagtaggcttgggtaaaagtcagaccatgggccatgaaaggtagaagcctcttttctgctcttcagcagaaatcttgaggctaaacctattattcctactgctgtgggttctttcagagcagaattaaaccatttcagaaaatagttatatgtgtgagttggagttcagaggagaaaacttactttagagcttgatatttaaaagatacttgttatgcatctttttaataaatcaataacaaaatcgagaattaagtcataatgaactggtatcttggagatacattcaaacttccattaggaagactggcctatttataaaatctgcccacttttaacctggtatctcaaagaaaagctaaggtcagctgtataagttgaaatcactgcattattataacatcaaggaggcaagatgcttcatatcccatgtatctcaagaaagaaaaaagctggctaagttgataaagggaacttgcaatccagaaccttttttttttctttttggcactaaaagaggaaatttagagaaaagccaagatggtagacagaggtctcaaagttctggcctggagggaaatgaggtgaacataggagttagtggcttatgagaagaggtagctgcctcaagacacctgagaaattttttgtaaacatagaagtaaatccaaagagagtatttgtatattcaagtattatccctaaatagccccctgaagtattcttccttgacattggagtaaagaaagataactcaaaaatgcaattaagtctgctgtttggcatttttaatcttcctttatttggaattttctttgtttagttttattttggtttaatcaacttgatgttgcaagtattttttacccacattatattatgacatgaaaaaacattgtagctgaaagaatagagaaataacccatgaaactgattaggaaatcatagtctcttatattagtgtgttttaaagcataatagcacctggttgtagaggcttctgaagtgcagagaatctcacactcatgagtgctatcttgagggcatattcacagtagccaccttatccaagccactcagatactttgggcttagcttttaaaaatgacctgcaggaggggaccagggccattgaaagtagtagaaacagaattcacaaccagaatccagacctcattcagctcaatgggcctctttcatctctaaggaccctcacctaactccctggctagtgaccatcactgacccaggatagtaacctcggcccctccatggatttaagattaagccttgccagtccctggaaactctgatcagaagaccaagcagcaagtttcatgactgaccagagaatataatttctcagtctcataagcctttgggttcagaaattttagttgagatgctcttgtgacttatttggtgtctgctggctgcctctccacttgcccgtttggtagtcaccaaccatctcacatgcgtggatggcactttctagctaaacttaatcacagtcccaacaggcctaaggaatctcttcagttcctgtataaggagttggtaaggttggccttttctttacagcagagcagatttttatggaacccctctggaagattttactgtaagtaaacggaccattgactagaaagccagaaccagtgtttccaagccagtgcagttaacactcatgtatatgtgagtgtgaaaagcttgggccatataatcagcattattttatcaagtgtttttgtgttttattttaaaagctttgaataacatcttcactgtgtccattgttatcacacccagtgagccaaaatatcagtgcatacagtgagctccaagagtggcccaatttgggatttaaaaggtgtgtttgagttaaaagcataaaaagccttaaacttttaaaactgcagactattgtatccttctaactccagaacagctccgtctaatgctgtccaacttggcaataaaaacaaaatgaagaaagccgaaacacttttagactcacaccaagtatgcagtatttcagcctgacaggattattccttggctggagtgacttacgttggaaggggaagtttgcatggaaatgcctttgaggttaattgtaatgtcattaatgtgatgttataatcacatctctgaatttccttcataaatttcttttctatttttatcctgtttttatttttaatacactactttcttgaaaaagtctactgtagtctcacgaaaatacaactccccttttttaaagccccgtgaaaaactggtttttgcataaactgtagtttataaaagcatggtcatctgtcctctcctgctttgcagttcctttttagtctttgatcgtaacatacgcctgcatcatgagtgactttaaatgatcaaattcaagtggcagcagatattgcactgagcttagaaaaaacaggtcttgtgctagtatttccattatgactgtttagtatagtattgcccggaatatggcaaaaccaccagagataattctttttaagaaaatcatctgtttagccaaatctgtggtagatttgcggcacagactacagtagaggaggaactcagtataaaccacagaaactgctcaggaacgctgcaaggctgttgtaatcagattgcttgtagctacttgggctgttgttggttccgtctgttgtgatgagagcacagggctagctactaggttctctggcgttcccagcattgtctgttctgttgacctttgaatgtatttgtctcaattgttcttgggctgtgggagaaagactttcggatgagaaaacaatggttcccatcagggacactgctccatacccaccctttgttttgggctcactttcacagcaacaaaatcccaagtttggtcatgctgccctcctgcctcctatgtgctgattcccacttctgaaaacacatcttgaatgtgcctcttgaaatgttgtcatttttctaatcttgtttcctttttaaaacaagcattttattccatgatttgcacagttctgcatctatatcaatgacttttcacccattccccctttccaacgcatttcttgggcaaaagtttgtgtccagcctgccattcaggaaaggcaaaggtttagctcaaatgtgctactttgtggtagatggttggggtcaaagcctgttcatgagatctctgtccccataaccagaaaacaaatcccactgatacctaccaatccttatgatctgatacagagaaaagaaaatctatacagaattctcagaaacatttactctatagggcatttagcaaataaatttctggtgtaggaaaaataggatattataccaaaattacaacaggtaggagacagaattttaaaagtaaggattatgatattcagaatttatttatatgtgtacctgctctctctctctctgggtatattttataatcaaaatattatgaagaaagtatgtattttattttgctttttctcagatggtaagatgtttatatttattttgttgttctgtaaaaatgatctagtcctttttcccattagtgagctcttgctaatattagtactgtgtacaatctgggcctgctctcacctttctctagaaatccatcaccatgactattttataaaatagtgagtttgactaaattgcccgaagattcctttttcacaaaaggaagctgtggtgtccagccaatgacttgcctaaggtcacacaatgaaaaaactaaagatgggtgaagttagacacctcttaaacatagggcaaggatttccttttatagcctatgaacatctactctcaaatcaaatgatttcagagattctcctgccattgccctgtatacaaaaaacaaaagcaaaattttcttccatacatgggagaaatagaactgcttttaatgaagttctgagattcagcacagtcagttaaattccttccagttgataagcactttatgtaagacctctgtaagtgaaacctgaagaactcctttgattcccctttccattattgatcattgtttataatctcttgaacaaagagaatacatctacattttatatagatgtctaaagggaaacaaatctagttttaattccgtgttatggtgttggttttaggaccttgggcaagttgtcacttgattttctcataaataaaacggggagaataactgtacttccttcgcccatagtaaatatttgataaatatcatctccagacctagaaccaatgtggagaagttccagaaaagatgtattgttacagtttatgaaattcataatacgtaattcacaaagtttaaatagataaaatacttcatatacagttattataaattcctttattcatctctataatagttagaaaaacttattctgagggactataggtcctgtggaaactcacactccacttctactcttattctttttttattcaggtgatattagatataatgaagactaacagtagtgttcaaggttacctttaatgcatccagggttacccataatatttattttacctctttgcaccagcattaaaaaagaagtgtgaggcaggggtggtgagagaatactttgaagagaacaaggagataaatgaccatctaggttaggcaagatggggacgtgctcagaaattatttgttaagttaaagaatgttaaagagacaatggaagtttatgtaataaaataaggagtcctttgctgatttctcttcttctacctcacagatagtttttgggccattctctttgtgggttgcttatttcccgcaccagtctgtggcccttaaagcaagggtcttggctgggcatggtggctcacgcctgtaatcccagcactttgggaggccgaggcaggcggatcacgatgtcaggatttcgagaccagcctggtcaatatggtgaaagcccctatttactaaaaatacaaaaattatccaggcgtggtggtgcatgcctgtagtcccagctacgcaggaggctgaggcagaagaatcacttgaacccaggaggcacaggttgcggtgagctgagatcgcaccactgcactccagcctggacgacagagcaagacagtgtaaaaacaaacaagcaaacaaataagggtcttaggacgagctgcctaatatttcatctttgtcagcaagaaaagaaagtagaatagaatatctttgggtatgggccctgtttttgaatttggtgtagggtgttttgagagaagatacagctaagatcaccagtccttgataagacagggtttcttttctcatatgtgcttcaaaagtcacaaataatcatcctgactctccttggcccacctcaaaccactctatccccattggtttggatatggtcaagtccagacatgtccctctaagcagccagggcagcagaatctctacttaactaacattagttcttaatagactatgggatattgaacataaaatccgaatagctctccacttgtatttaggatgcatttaacatttttctcatagtgtctatatttttattattacatagttaagtagatcttatgctaaaattcacataatgatactaaatatattctctataaaactcattttggagccctctggatcaataaattggttagcattatcaatatcatctctgctttgacatacctgaaaatcacgtttctttaagttaggtaaatatttaagtatgagaaaaatctgaccaatgtatttagcagactttgtgaatttttttaaaaaagattggttttggaaaatacacacatacattttgccaagaacttgccccctaatgtttaatcttgtggctttcaggggaaatctaatttgtatccttcgtttatgctcgactcaacagattgttgcactgttagccaagtgctggatggtcttacagcccatggggcttttcaggtttcttgattctctacgggcccccttgccttgcttctcagtccctggtggataatgaatgccatacattttaaactcaggccaactattcaaaaattaagtcacactacaaacaatgagctatctcagtatttgtgaaaactggagaattatttctttcccttcttcccatccccaatggccactcagtttttactgtgaggtttactgggtagctgaagatgatgactgaaggaaaggatattccactgaagtgatagactcaggatagcactgtacttttctatatgtgggtgacagtggcctgggaaagtgttggggctgcgttttgagaaccctaggaagccatggcatccccctcaagccattcaaacaccaaaacaactcatttgggtttacgttgtgttggatgaccactgcagcttaatcaagacttcttcttgccattgctttgaatttccatccacttagccagtattgcatgctctatcactgccaggcctttgttcttccacagatactccttggcccctttagaacacagtaacagtattgttggtgatgaagggcagatgggaaggaaggcttgaaatgggcccagcaggagctgacgttctctatctcctctcagattattttctctcttaccctctagaaagctccccatcatactccttagtatcgataccacaccatatcctagatgaaaggcacccccgtcagtggggcatagaaaaaacctagggcacggtagtcaactagagtattccagtggctcagaaaaaaattctgaagcactcttccttttcttgtgaagagcttttggggtttaataatggcaggagttccaggttgctctgcttctcttggccaggcacttaacctacaggaggttccacctgaggtcatgggagtcactactagtggcttggaacttgaggaagaatagaggggctcacggtccaaatcagaggagatggagtttctgactttcagagtaaagcatgaataccttttcctatgtacatactgttaaatcaagtggttggatattgtagtactattactatcaataatagagtatttgttctattatagtataactgtaattctttttacattaaagtagaactaggacaaactataccatttgtcacattatttcccagggttctaactccaagaaatgagttctaatttcccagcaataaatacacagttgaactttataacctatcacattttttaattggaagttactttatcttcaaacctcctgttaaaaatataggactttgaaatactatgcagccataaaaaaggatgagttcatgtcctttgtagggacatggatgaagctagaaaccatcattctgagcaaactatcacaaggacagaaaaccaaacaccacatgttctcactcataggtgggaattgaacaatgagaacacttggacacagggtggggaacatcacacaatggggcctgttgtggggtggggggaggggggaggggggagggatagcattaggagatatacctaatgtaaatgacgagtcaacgggtgcagcacaccaacatggcacatgtatacatatgtaacaaacctgcatgttgtgcacatgtaccctagaacttaacatatagtaaaaaaaaaaatataggactttgaaaatgaaatttgccagtatgaaagcagagatacttagagtcattcttataccacagaattagcgattactgtatccagtctcaccattttatagatggggaaactgaggtccagaatggttcttctgtgatcccttagtatttcctcactttgcattttcttttagaaaatgtgaaaaaaatctaattgttccatgaaagaaggcaccgttcattattaatggaatttccttttattcaattttgcagtgtctgcaacaagattatgaaaatgataatttgatctagaagtctttccagcttcagcaaggttactttgtggagttggagataaatgaccagaagaaaacttcacaaaattagtgtttacacttaatctggcaatgagctataatttgattggtaaaaaattcatttggtgtacctctggccctttgctgctggataatgaaaatttatatctgcgtttcagacatctggggagggcctgacagctttggggctgaatgaaagatgatgtcacactgacccctgtcagcatttcctcatagactggttacccaaaacccaacagcactcacactttttttccccgctgccagagcagactctcatttttattttggaaagttaatgacactgtaaatctaataggccattttagtgccatcatgtggatattaaaaaatcatgtgaccagtcagggcaccatatgtgggcttcactgttgtctaatggcaggaataagaggctgtaacaaggtactgagggcagccagtgtttggaattaatttcgaaaccatagctacctttaaactaattctgaatctctgctaatgattattgtttgccatttcaattaagtttgctttaattagctagctaatatcagattatgttggacctcagaaaataatttaccacttataaattgatgagtaactcatattctgtggcacagcactgacccatagaactttctgtgacgatgggaatgttctctgtctgtgttctccagtaaggtagcctctagccacatgtggctattgagcacttgaaacatagctagtgatctacggaaatgataattttaagtaattaaaatttaaatagtgacatgatggcgcaactataatgtaagactagaatatcagaaaacaacaacaaaaaagcatttccttcaggtatctagtctgcctttcattggtgccatagtggaaaggccaaactacctggtgacagagctgaagtctgatttacctttgtatcatcataatgccttttggacagggtaaaaatatttagaagcaagtgatgcataaacgagtgaatgaagtggatacgtagataatgaataaatgaatgcaagcaatttaagtgattttttttctattttaccagttcttgctgcccttttcctgaaggacacgtcagccaaaagttgtgagatttgacagccagatgaattcttagtgatcacttagcccaacccattcaaaaccagaccagagtgacttccaggagctgccactggcttttttttttttttttaacatctctttacgtctccaaaagctgtgctcttgagtacagcaaaaagcccatgggtccaagggggctaaaggtaactgggcacacaattcacactctttcacaaaagaaggtgggaaggcaggaaacaattatttttggatgctagggtaattgtgtagccagatagaagtatgtaaagggaaattgaaataatttctgagtttactccaaaatgttaccgaagtatttaaaaataaccattaatgactgttatctaatgttagcctcataaaattaggacaaaggtgatagttctggtgaagaagaagatgatgatgatactattagttaacatttgtttactgcatattgtttcaaaaatgatgctaaattctatgtaaggattactttagttaatctttgcaacactgcaagatagttccagtatttgcccattttacagatgagaaaaagaagagagtgtaagtagcttgcttaaggttatgcaaccaatacaaggcatagatggattttaaatccaaacagcctgattctagaattacatctttaaacattattgtatagagtgcctttccctaatcttcttcttcgattttcttcctactttccttccttcctttattcattgatttagcaaatgatttttaagccccaactatgcgccggatattgttcgagcctcaggaaatacactagtcaacaagacagacaaaaattcctgcccttatggtctttctcttctactggtgagaaaagacaataaaaaagttaagaaaaaagtgtagcttattggcaggcacggtggcttaagcctgtaatcccagcattttggaagacccaggtgggtggatcacctgatgtcaggagtttgagaccagcctagccaacatggagaaatcccgtctctactaaaaatacaaaaattagctgggcgtggtggtgggcacctgtaatcctagctacttggggggctggggcaggagaatcgctagaacctgggaggcggaggttgcagtgagccaaaatcgagctactgcactccagtctgggtgatagagggagactccatctcaaaaaataataataaaaataaaattaaatgcaagaaagataaaataaagcaggtaagaggaatatgaagtgttagcaggtgggaggaacaggtagaaattttaggtaagggaggtctcactgaaaaggcaatatttgagaaaagaagcaagtaagtgttcttttcttttctttttgcttgtttttgagacagagtttcactctggctggactaaacagctcactgcaggcagcctctgcctcccaggtgatcctctcacctcagccttcccaggtagctgtactaccagtgtgcaccaccatgcctggataatttttttgtatttttttggagagacagggtttcattgtattacccagactcatcttgaactcctaaactcaagtgatccacctgcctcagctttcttaagtgttgggattgcaggcatgagccaccgtgcccagtcttattttctaactatatagttagaaaatgtatatttatttacttatatttatatttgttaaaatgtatataattggaatatattatatattagaattatacatattagaataatatatatattagatcctttaaaaaaacttaatgagatggttcctaggttaggaggtaaacttatagttaactgtattcttgataaaaaattaggatgattttatatatatatacacatgctattattatatatagcaaactaatgtatataatatatatataccattatatatatacacacacctatatatgtaatttaaatttatgatgacagtggatttgggcatgcaagtgtgacagactttctctcactccttctacaccacacacccacccctacatatgtagctacatgtgtgtgctcaaatatatagtggtgtatatatagcatcctgattttttgccaagaagaaagttagctataagtttaccttctaacctaggaatgatctcattaagtttttgttttgttctgttttgtttttaagacggagtctcgctctgtcgcccaggctggagtgcagtggcgccatcttggctcactgcaagctccgcctcccaggttcaggccattctcctacctcagcctcccgagtacctgggactacaggcgcccaccaccacgcctggctaatttttttgtatttttagtggatacgcggtttcaccatgttagccaggatggtctggatctcctgacctcgtgatccaccctcctcggcctcccgaagtgctgggattacaggcgtgagccaccgcgcctggcctattaaatttttttttaaaggacctaatatagattgatattcaagttgagccagagctataaaaagctaagtacctctgtctatgaaattattttcaactaattcctttgattctgtgatacttcgatgtttgctgttatagcgagatgaggataatgtgctgaattttatagttgttgcaaaaagcccacagcagcaacactggggccccacagacacacatccaagatcatgacatagctcaggagacagcacacacacacacacgcagctatatacgtaggggtaggtgtgtggtgtagaaggagggggagaaagagaaagttctctgtcacatttgcacgcccaaatccactgtcatcacaaatttaaattggatacggtgcaacattgtctgtcaaaataaaactgtaagagtaagtaaagagagaactttttaattccctgaatgattttgggcaagcagtagtaggctttttgatgcctaatacagaatgattaagaaataaaagttaacactgatatggactgcattctgtagtatgtgaacacaaaaaggatactttcctaattggatacagtattcaaaattccacaagttctgaagtcactgtgtgagaccacaggttacaggcttttctgagagacactctgcctccccctgcctcaccctggatgcatagcactccttgatttgtaaaatactcattccagtcaaaagggaagtgtccttttgtgatccctggcatcacttcctgtttttccttgtaaacttcccacccaagctgtggcattattgggatcattgcccgaagtaactttccattacattgacaagtcaagtgcatacatctgatttgagtgtcatccttcctccagatttcaaaaattctactgcaaattaaacaacccagctcttgtgatccctgttgaaagttttatcttcttaaagatcattctgaaaaatgaaattttttcatgtcacacaattttgattaatggatcctttttttttcctgtaacttttcagaatttgtagacttcttaaacctaatttattttaaaagcacacagtaagatgtctcttcccattaaaataaaaatatatttctcttctggattatcaacctataagctatattgctaaacttttagctttacatgatttatagtagtcaaatgattactgccctaagcattaatttcactatagagctattaaaatatttaattagagtcactgataatttaggatgtataataaaattgttgtcaaggccatgttgtaaattctgattatgtttgtagatgagtgagaaaaactaccctatgctgaaatttttataaattttgaaattatggggattatatatatatatattacatatatattttattttgtaaaataaaatatgtaaaataaatatatatatagttttttgagatggagtctcgctctgttgcccaggttggagtgcagtggtgtgatctcagctcactgcaatctccacctcctgggttcaagtgattctgctgcctcagcctcccaagtatctgggattacaggtacgtgccacagtgcccagctaatgtttgtatttttagtggcgacggggttttgccatgttagccaggctggtctcaaactcctgacctcagtgatctgcccgccttggcctcccaaagttctgggattacaggtgtgagccaccgtgctcggcctatttatttatttttaaacatttcatgtatatagtagtgaggttatgttaattgtgcataatttacgaaaatgctaaatattttgctttttaaaaatctttctgaacttgagcagtgttatctttaagtacaatgttctagtttattacaaacccaaaatgtaatcctatatcagaatctttcctttgtgttatatattttattgtctccacaaaaatgttttattaaaaaaaaaagactccaagagtctagctatagttcatgtatgcaggcaagaggtgggaattctctgtgaatgtcaaatagaagttaatacaaacccatgtagtcatgtttactcaggtgccaaaatccagatcattctgttatgagttcatcttctaaatatatggctctggctatctgcggatcatccaccctcctgttacctacttgtgcaaggaagtcaaaatgaacccacagagatggggtatctgtcggttgttctctatggtatcatacctgtttatttgtgtggctagtagagactaaacttcctcagtagatttttatgacttaaattatagggtaatatatttattctgttttaagtaactccgtgtaaatggtggccacggcgatagcttaatgtgcgtttttgtttttgtttttgttttacagataaacactgtcaactttttattgagctacctacagtatttttgctatgcatatctgtatatctcttttgcaaaattaagattgcattttcataattttataaactatttttcttacttaacaatatattgtgaaatttcacaaggctttcccccaatattgtaaagtgttttcatgaatattattttaatgtactagattgaaacatatagaattagtaatatttaatgttttttaacctatagtgtactttttttttttttttactagagaaggtttgtgtaaattagcagtacatttatttcttctcatttcagaaatagcaaaaatgtatgcaggaaatgggggaagccagaagaccttgcaacctggcagccagtggtcagatgtcatttcagagatttgggaaggtttcaactattgcttttaagatacacctatgcctaaacaccactagaaatgacacaacttatttctatcccataggcttgaaataagtaagagagagttgctatgaatttggttaaaagagtaaacctagtgagaaaaaaagtagtttagatggtcgtcattttgacatcaaatgatggcaaccaaataaggttattttcaccatcataccatcagaaaagaaagattcgggatttggaaatcaatgaaagcagccagaaaacttccctattgtgcaacaaacaagacgtggaaacactcgtgagttgactctactcagaggtccagaaaaataaaggttgacactaaaataactttggcttacatacgactcatggcaaatgctaaataatgaaaaaatatgcctttcaggtctaaaattttctgggttgtgagaaaacatgaagcataaatcatatcaaactattcctggcattaggccttcaggatgcatttgtttgaaatcaagggccaaattgcctggaagagcgaaaactgctagatgccagctgaggcggaatgccagccttggaactgacacatcatttctggagagatccatatgcacgaccctagtttgtcttcaaagtggttcccttgaattgattttgtaaattaacaatattaggccttctgtaggatagaaagtgcattagtcacactgctcttactttacccagcaaggaaatctattgttcttttgtaataaaatggttctggaaggggtgagggtgattttgccacatcaggtaaaaggaatcacatttagttttcaggcaggtttaatgaggaattttaataataagagtaaaaagtcaatgagcataacttcactaaacaactcttaaaggaaagctgagccggctcctgttttcacaaatctatgtaaccatcgttgaatgggttccaagcatcaattgttcccagtgagtaaggacataggatatggcaaaaactcacagcaatttattaccagaatgttttaaaagaaatggaggatttcagaaaaggaggagctccacggattcatgtttaaattcaccacaaatgatttatctttgtgttccatttcttgtccaaggtcggttttacacaccatgtaaaattgcttcttttgaagaaagtctgcttttttaaaaaaaaaaaaaaaggaaagaggagggggaaaaaaaagacaatgagtctcctggaaaatacttcataaggctttttttttcacattagtgttttgttctttacttttggaggagtttaatctgaggaatattgtgcaaggaatagagtggaatataaaataaagttaaacaaacatggctactttcaataaatgatactgattttctaacaactgcctttctattttcaaagccctataagaaaagcctgggcttttaggcttttagttttctaaatcttcacatgctctgatttttgcagagggtattcacattatatatatgtgtgtatatatatgtatatatatttataatgtagattttgtatatatataatagatattagatatttagatatatataatcctatagattatatatataaaatagatactagacatatataaatatataatcctgtagaacttttttttctgaaaacctaaagacttatttatgttaatggtagaaaattttgctgtaatataaaataataatcagtttgttggcacccttagttaacaaaaatatgtttattaaaaatctaggtagaaatgaatagtttcagaatcatctactgcaacatttaaaaaaattcattgtcaattactttctttacaggatttattagtattggggtactcaatgacttaaagtctaaaccaaaactctttttgccttattgaattctaaccaagagcttctgaaagctataactgaaaaatgatttacgaatttgtttttaatcaaaatggagtttcctagaatgagtttgtttttttttttttttaaacactcctgggctccattattcctgtttgtaaacatcagtgtgtcccttcaaatatgtcttttctatttgtattaaaacctgatcatataattaaattgaatttggcaagtatatatcagccatccactatgtttagtttagttcttttagtttagtttagttctcttttctaccgctaattctacaagctgagtgaggcctgctaatttccactgatgttcatacatgttagtttaaaaaaaaagttggcttttacaaagccacaaaggggaacaaatatagctgtattgcctgtcttaaaccaaaatgctttagcaattgaaagatgggggcagtgtagacactcaagaaagctttgggatctttagatgaatggtatcatacagatgtgtattattgctaattctttgttctcaatcacttgttttcaaggacactaaaatccatgtagcccctaaaaaagataaataagggcaagtcacttttcttcctccagtcacagactaaagaaattatttcagataatatatagcccttcagccatgggagcaggaagtgtttactgctcaagtcagggtctcagttggtaaaataaacggaaacttctggtttagttttagggccttctttcaaataaaaacttcattttctctgggcaaatatattgatttaattttgtattattggtaaaatattcataaagtcaggtcagtctttaaagagtaccaaaacataactttgccgattttttctgtttaagggccagctaggtttgtttaaaaagaaaaacttaaagccaccaaaaagcctatggcatttctttctcttatgatctttaaaactggttcaggctcatctgtttggagttatttaggtgtgtccctctttgaaaatgggcccccataacacttttttaataggataaaagttgagaacatggagtcaaaatggagcaaaaagttgaatatttcacatggtataaacatttttttaatcaaaggaaaagaaaagaaagttgcaaaaaagccaaaacatgatgaaattatctaatttctcatatattcctttcttttttcgttgctttttgtaatcttccagaacacttttcagtttggagccaaacctaactctactttttacatgcatatttttcacttctataaagactcgttaattcaaaagatatttttcaagcacttacaacatgcctaaaggatgcaagtcaagtataaagaagagagataactatttttgccctcatggagcttcctttcctgtgatgaaaattgatattctgtcagtaaataaataggtaaatttcaaatagtgaaaagtattaaaaaaaataaaaaagaaagagaggaagtaacaaagtgggggtaatgtgacagtaatcaagtgacattttgacagacatgaaacagtaaatgcctgaggataatagttacaatgaggggactgctttaaaggtggaggtgagagaaggttccctgaaaaagtgctatttgagtgtggtctgaatgataggaggagctggtgtgaaaaccaggcaggagagcattccaggaagaggccacagcaggtgtgaagacctcaaggcaagcaggagcttggcatatttggataacataaggaaggccaggagcatagtaagagcaattagattactaggctaggtgagggctagaactggtagtggagaggtgacaaagtggaggtagccagtgtacttttgttgcatatatatatatatatatatatatatatatatatatatatatatatatacattgctgactagaagaccaagactatgttataatagaaaggtcaagagctttggaatagatttaacattgttacagatgtgcctgtgttgcctgttttgtcttcacattgttttaaaagacagggcaagtagtcatttgttaaatttcctccccttacaagcagtttagctttttttttttttaccttctcccttttattcattgacattacagctgattacagcctctgtcctgcaggcattggagtatggtagagctattcaggtcatggtataaagcgtctgagttttattctacatgtagtagaaagccatcagagcattttaacaggggatggcatgatctgatttatgttgtctaatgatcactctggctgttgtgagagaagcagttgtggggtattcctggagatgctgctgcattaagcgatcattttgagaagtgtagtggaaggagagagagaaaaaatgtgggtagttcctagatatattctaatcaatcttaccattcagatcatgtccaaggccccaaggtatatttctcaagccccatgagagtagaaagaatcccctgaaagctttctgatagattgaatgcagatagagaaaatgaaaaaatcaagaataacactcagatgtttggcatgggaaaacagatggcaggtggagccattttggggatagaggcaactgagaaaagagtgtgttggtgaggagtgtgcagggaggagggtacttcaaaagttccgtactaaggaaactaaatttgagatagctattaaacatccagatttagatgtcaagtaggcaactggatacaaaggtctggacttttgtctagtgaggtcaagactgaggatataaatttgggagccatgaacacaaatgatctttaaagttctagaactggatgaaacatctcaataagacagtgcagaaagagaaaggaaaacagcctaacatgaaaccctcagaaactacaaccctgagagaaagaactagtaaaggagatggagtagaaactgtctgtgaaataggaagcaaattagaaagtttgagccatgcaaatctgtgaaagagcatatttaaagaaagaagtattggtcagtggcacataatatcactgaagaagatagattcagagaccattgatggtcaatttgacaagaccacagaagaatgaggagatcactaacttctgtgtcatggagtgagcaccatagcagaagacaagcagatacaccatccaaataattgagatggtgaatatgtagcagggtgtttttgtttgtgtgtttaatttttctttttgttttttactaatcaatctcatcattgagatcatgtccaaggcctcagggtatatttctcaagccccatgagagtagaaaaatctcaaaagagagagatcgcacacgttgctggtaggaatgtaaaatggtactgccacgttgggaaatagtttagaagtttcttactgtatactccggcaagtcactcttaagtagttatccaagggcaatgaaaaaatagttccacaaaaagacttgtgcacacatgtttgacataccattaatcataaaatcaggacattgaaactgcacaaatatccattaatagttgaaagaataaatccctttgatattttcatgtactagaataaacaagactgaaatactgatatatgccactcaatgggcaaatctcttagagtttgtgctgagggaaagaaactggacacaaagaatccaggctctctaattgtatttatatgaaattctaggacagggaaactaatctatactgattaatagaggaaaattaatctataataatcaataattatttagggttgggtggaaaaggggaaactgaaaggaggcatgaaggagctctctggggaggtggaactgctctctatctcaattagggcggtggttacatggtgtatacatttgtcaaaagttatcagcctacttaatgtgaatgaattgtatctcaataaaattgatagggagaaagagagaaagaatgagatctctatttcttctgattagcttcttttgccctaaatcattttcttatcacatttgcaagatcttgattatgttgatagcccttcatttactgtttcatgtcagtgaaaatgtcactcaattactaatttctattgcatattagatagctctttttcacagagtagctaacaataatgccgccgtgttttcagaaatatgtttcttggtacagctatttttgttttttgtttttgtgtttgtttgtttttatttttctttaagttctgggatacaaatgcagaatgtgtaggtttgttacatagctatacatgtgccatggtggttggctgcatctatcaacccatcatctaggttttaagccccacatacattagcttatttgtcctaatgctctccctcccctcacccccactcccgactggccccagtgtgtgttattcccctccctgtgtcccacttatgagtgagaacatgtggtgtttggctttctgttcctgtgtgttagtttgctgaagatgatggcttccagcttcatccatgtccctgcaaaggacatgatcgcattcctttttatggctgcatagcattccatggtgtatatataccacattttctttattgtgtctatcattgatgagcatttggattggttccatgactttgctattgtaaatagtgctgcaataaacatacatgtgcatatgtctttatagaagaatgatttatattctttgggtataaatccagtaatgggattgctgggtcaaatgctatttctggttctagatacttgaggaatcgccacactgtcttccacgatgattacactaatttacattcccaccaacagtgtaaaagcattcctattgccccacagcctcaccagcatctattgtttcttgactttttaataattgccattctgactggcgggagacaatatctcattgtggttttgatttgaatttctttaatgatcagtgatattgagctttttttcctatgtttgttagccacataaatgtcttattttgagttgtctgttcatatcctttgcccactgtttgatggggttgtttgtttttttctcgtaaatttgtttaagttccttgtagattctggatattagccctttgtcagatgggtagattgcaaaaattttctcccattctgtaggttgcctgttcactctgatgacagtttcttttgctgtgtagaagctctttagtttaattagatcccatttgtcaattttggctttttttgcaattgcttttggtgttttcatcatgaagtctttgcccatgcctatgtcctgaatggtattgcctaggttttcttctaggatttttatggttttgggttttacatttaagtctttaatccatcctgagttaattttagtgtaattcaaaataaggtgaaaggaatgggtccagtttcagttttctgcacatggctagccagattttccagcaccatttattaaatagggaatcctttccccattgctggtttttgtcaggtttgttgaagtcagatggttatagatgtgtagtgttatttctgaggtctctgttctgttccattgttctatatgtctgttttggtagcagtaccatgctgttttagttattgtggccttgtagtatagtttgaagtcaagcaatgtgacatctccagctttgtttttttttttttgcttacgattgtcttggctatacaggctcttttttggttccaaatgaaatttaaagtagttttttctaattctgtgaagaaagtcaatgtagtttgatgggaatagaattgaatctataaattactttgggcagtatggccattttcatgatattgattcttcctgtccatgatggaatgtttttctatttgtttgtgtcctctcttatttcctgaccagtggtttgtagttctccttgaagaggtccttcacatcccttgttagctaacacagatattttgatccttactttaacatataaggtaatttaaataaaatatgcctaaatatgtcctaagtgctgccattactagttttggatatctataataatgctattagattgacattatttattacccaaatcccactgtgtctttcctttactagtaacttgactgcttgaattataaacagaagctgttatgagcttttgttttatagacagataactggagtgaaggcatttcacacaaattgtaccacaaattttaataaatgtacccaaatcttttgctatacattatatatataatataatacatattatataatgtatatataatgtaatataacattgtgtatatatacattatatattgtatatttacacacatatataaatatacacacacacacacacacacatatatatatattgctgactagaagactaagactgtgttataatagaaaggtcaagagctttggaatagatttagacatgaatctcagactcgttgccagctgtgtgagagcaggcaaattccttcctctcactgagttctaattttcttatctgtaaagaggtaaagtaataattacttttctatcttgttatagggtttaaagataacataagttaagttttcagaacagtgctgacttgttatacaggctcaagtgtgaaagttgaaattctgtatgttatttctgttttcattcacatcgtcagcgtggtcagtgggtggtgggggaacaagagctgcttctaagtttctaagggactgccaatattggttaaaatcatctctaaattctaaactatccttttgaacaacaaggtggcatttgatggagcctaacagaagacatgagacattacctaaaatttttgtatcatttgtgatttttgagcctttgaaacagaatatcaggaaaaaccaccaatacctgcactaggaagcattctccttttcttagaaatctatgtaactcttcgtctccataagtaatccacactctttctcacatttatacacatatgtacttatatgtagttttttcagggtttaagaaaattagatctttaaacctgtaccaccaggattctgaaagcaaataaaagaccttgctatccagtaaaattttagatgatcttttcttatatctatattattaaaaatagtttcttatatcagtgactgctgctcttctgattttaccagatattaattatagcttatcctctgcttaacctcaactcttactgtaaatgtgacttccgcccactgtgtatccagatgggatattctgagatagtcacttcttcctgaggatatggaattcctttccaggaaacattgagaactattcttaacctggaacgcctatccatcttgtgtcatccttcagagatactgcaccttccctgctgcttctccagacatttatatgcacactgtttatttctcagctattttaggaacacctttcttcctcaatgatgaaagcacattaccatgaagtgattagctatgaataatcttataatgcttttgtttaggaaagaagtcactatgcctcaagatatttttgttctttatgctatatcatcattttgtttactagaagtagtttcaaactgcttttaaagtcatttttattaaacatgatttttatacttaaaatctgtttaatgttttcattcaaatataataaaatcataaattatctctgagccagtgtttgttaactctggatattcactagaatcatcttggaatttgttttttatgtattatgcctgggctacacacttagaaattttgatttaataaatctggggtgggacctaggtttaatttttttttttttttttttaagaggaagtctcattcttgtcgcccatgctggagtgcgtggtgcaatctcggctcactgcaacctccgcctcctgagttcaagcgattctcctgcttcagcctcctgagcagctgggattataggcacccgcccccatgcctggctaatttttgtagtttttagtagagacggagtttcaccatgttggtcaggctggtctcaaactcctgacttcaggcaatctgcccgcgtcatcctcccaaagtgctgggattacaggcatgagccaccatgcctggccataatttttaaacactctgcaggtgatttttaagtggaaccaaagtttgagagcccatattttgatgcaaacattttttgcaagcattaaaacactataccttttgggatgatcaagagttccattagatctcagaagagtcactgaagtcataattgccaatgactgtgattattagatctttcaacttatttttcactaggatcatttttcctgcaaaaaggaattagccaaagagagtataatgtgctgatagtgcagtgaggaaaatgtgtaagatttgaccttactttcatcccagtcctgccacagacaggcttggattcctggacaagatattctctggatgagattcacaaacatgactacatcaggaaccaggatggtgacatgaaagtgtgaaacaggaagagtggacattggcaagcaggggactcacttctgttctaaagggggctgcgctactcagccccagcaagttgtttctaagggaagatgcaagttaagtgttaccaagtctttccatttttaaagagaagtagaaatttcctttttggggtgaacattttcaattattattagcatctaatcccaactttttgttcatgtgattattatttatattgtggggcttaatttggcccccaggacaccagtttgcaatatctgagttaaatgatttctaaaattcattcaattctaacactctaaaattctaagcgatctaatttggccaaaacatgaaaatactcccttaagatgagaagcttctatttgaatgtgtgtttatgtcaatcttcctcttcctgaatcctcccattttttaattaccgctgatacccttggtcctggcagcttactctttctattctgacccatcctagagttgacgtctcaagaatttaaataactctggctagtacactgtatttacaatatataggggatcccggtgttatgtcaaaggaaagccttgtcttaacttttcagaagggaatggaatgtacagtacggtgtggcctataaatcattttcaaattagtattctgtacatctggagaagagtacatttctactcatgcataaattgcctatgaacacatttcaaaaacctatgcttaatcttagcaatgaacatttcaaaaagtaaattaatatcttcaaggggaagaaatacagtatattaaacaggaacccactagaaactcgatagttaagagtctgtcagcgtttccattataaaccctgtttttgaggggtttataactcacttataaaaattcattgtaggctgagacttggcatgtaaggtcttagcctagcagcttgatgtgatattaggtctgaaagacctcagattcttgtcaacgagatactattttaagcctccaagatgaggtctaaacaaagacagggagtgatttaaacccatagcatccagggacggcagaggaaaactgaaataactgctttaagatcagcaagttgagccttggttttgcagagtcccacactgttgtctacactgaactgtacatcttgtactgcagaggatgcggtcagctttattttcctatttgggtcacactcaatgtaactttaattcctcatttggtagcttaatatattgtctgttgaggttacagatttagatgagtgtttataaataaggcgaattaacattgaacttgtaactctttttttctttccatttgataaaagatattcctaggaagtaggaatagagtataaaaatgtcttaggccattgtaaatttcttgtgtaaatagctctgtgatatgttgcatgtttaaattagcacaatatgtattcattttaaatattgatctttaaggaagtcctacaataaatctgaatactcttttgcattactgtttacattaggtctactatagattaagagacacagttcccttgtaaatttgcttgcagagtaggcaggggcatataaataattctgtttccaattatacaaaacaatgatgataaactattgggagctgtgggacaattgtgcagagcttggctgaatcacagactcagaccaggcttgtgagtaactgatgtgcagctggaaattggggctattgtctaaatcaggaaacaaatgaaaaaggggcatagaacaaaattctataaacgtagctccatcaagatgcagttcctttccagctgtaaagtttctaaagagttaccaaagctatttaaaaacataaagacagaattgtttggcttggtaatggcagcaatttgtctgtaacaatgttaagtatgttgtggtaaccttcatggggaaaaccctatggatggacttggttgtggtttagggtttccaccttctcccagtagcggttccttgggctgtggcatgaactggcctttgaacaatttgatagctcaaccaaatttcagctaggaatgttaaaacataatgattgaaaattaagaataaatttacacctaagccatataattccaaggccaagatcaacccattcttcttcacattcctatcatctattcagaagtgcagatattcacatggaaatgaggttggttgaactgtttagcttatattgggaaacatatctgctaagcagctgagaaatgtattcatttcagtctttccatttgacaaggctcattctcccaagtaaaatactaagaatgcaatgacagcaactgaagccgttccatttcctctcctgactttaatctctccctaagaaaaatatttcttgaaatgctataatgtgtgtgcattgacactcttacttagatatttaaataggcttgtcctatttattctctatgtctggcaaatttcttttaatggttatttaaaggagtgttaattattttcctgattaatgattattataatcatacagtgcattttagtttataaagtgtattcatgtgcattattatattgttacctcattgacattattataagaactttagtaaattaattggatcaatattattatttttatccctattttttaaatggtgaaagtaagttcagagaggttaagtgatatgtccatgtttactcatctagtaagtgtcaaacttagactccaatccagctatttaaacataaataccacgttctttccactgtggtattaaaatgacatgttttcaaaagggctgcatttagccgagggagtcccacaggagatgtgtgttgatcaattggcaaaatgcacatcaaggattcttgctattcatctccatgttgcttcctgtcgaggtgaagtgggcagtgtaaaccacggacagttctaaactgtagttttaatcaatggcgccaacgaagttcataggctcaccttgaccatgcttatcctcaatataccatgaaaatgactgctaaaatagtccaaaggtgagaaatgagaggaagttggtgagaaatggcaggatgatggctatgttgattccagggcttttttggtttgctattttagaactttatttgatcattctttgcagtcccttgtatattacatttcaagaatatacacctaataaatccatctgcttgcctggtggagctgattttgattcccagaaagttggacttaattgttaactcttttttttttttttttttttttgctaatggcaaggtattttaccagatgcttttagtactgaaagaacttttgggagcaagagttgggtgaaatttcttgagaagtgtggaaactgaagcagccagttgtacactccctggacattgatgtactcttacaccgtgtctggttaggtggaactgtaccatagaaataataactatattaaaaatgtaaaggcctctctgtacattatctcagggatacagagtattatgtcactacattggattaaaattttagatgctggaatcttaatgtaaaaagcttcaaaccttaacaaataatacagaatttagtctattttgtttcaaggctttgattttgtacagaatttctggccaactctaggaaggaaaacattctgcaataaagtaaaatactaatgactcaagaatactgtgtgacacctaatttggtgattgccacccaaagttatattcaccagtttaaatcaattacttggcatagttataattacattaataacactggtttgcttttccaaatccaaatgttatacgatgaaaaatactctgactctaaatggttttaattaaaaaaccaaccattttttaaaaaggtggtaagaagtatattttttgtcttcactttttgttttttgagcacatggttttcaagaaaaaggaaagtaatgattatagtaaattacaggagtcaggcagcagggtaattaacaggtaattatcaataaacaatttaaccacaaaagcttggatcccacctaccacttgtcaacaataaaagcttagtaactccacataccattggaaacagagtctacagggaacccctgaaaggactgctaatataaataaacaattctttcttgggagaatacacaaaggccaggctgtgggtgaccacatagaagaaggaaagaaaaatccagtaggaaggaaaaatattaggaaagcaaacatttggtttcagatttaggagaaaaatatgaatgtgcttgatactgaagccagaaaaattatctatgaaatgtccttctcatccatacataaattttatgtttatttaagcatgattggaaatgtacgatcgtttagccaagttggcattatgactcaggaaaaagtggactttatccagggctaaatatagccaacatgatttatatattgaatgattggtgaaaaatccaccaaaaatatatttactatggaaatgtacaactaggctttgaacccatttctaaacttcatagagaccttgattggaaccctcttcctttttaaaatgggtcaggtatctattactctagcttgagggtatgggaagtggttcctaagtagctagcgtaaaggagccatttaattcagacaaaaaaacctgaccctacctagtgtgaataatagtataaccataattttaaatttcattttggctctgttaatgtggtattgggacacaatttcaaaatagctaagtaagagattgaatttcattgtagaatagattttctctttctgaattttattttgtctacacacacacacacacacacacacacatcttgtctaaaatcatagttgaatatgccacaatcaaatgtacttattgaatattgtcaacaattggtgatgtgttaggcataatgcaaagtgcattaagtaaacatgttctctgtcatttaaggtgcaagaaataaaattctcataggacacacttgaaagacgtacatgcaactgaataaacattgagcagatgtacatattcaataaagacctcactatctacagggcaagggtaaatgtatattgcagagtgatgagagtaagatagcttgtgggagttataaggttagataggggagtcttaagaagtaatcaccatttgaccactgattagtcaggaaagtctttggggatgaagagttatcacatatacaatttgaatgatggtcagcaacaagcctggcacatcagagtagggaggtcttgcctgtagagggaggacagaacaatgctagaatgaagccatggtctctaggcctgggcagagaagctcagtcccgggcagatagtgtaagctgtctggggaagaccttactctaaagcaatagttttaatctttagtataatgtttagagtcctctaagacctaattgcccaaatatctgacttgactttgctctacattttgcctagactccaaactaagatcgctttcattttctgttgctcggcattatgtctgcctaaattttttccttcagattgcccacatccactttactcattagaactctgctaaatgacaagtttcccatggttttcttaattcccttttgaattttttttagacaaacctagatcttgttaaaaaacctcccactgtgtcttctgttattaaaaaataattaaataaaaagtgagtttggatacatctatcatataatttgaaattacacatgaatgtagagacgaaaagtgactttgaaagatcaattctcaaattttgatttaagaactgtgctattagctgaaagaatatgaaccaagtccattcttttgacctttgtaaagtcgaacctagtcaattattgcagcagagcagggaaccaaagaatagctttgaattggttagacccaaactgatttaagtttgcatgtggttaaatacgacattagttaaaaataattaatgctgtctttgacctttgaaatgaggaaggacattcattgtcctcccccagctcccactccattcatgtaaatctacttaactctttgcattgcctaaaacagaacacaacgttttactatatcttgatattaaatatctttaaaaacataagcagagttgtatgcttcttaaatggatggctttccaccaattttcactcagatatttagatatacagatatactcagatatttaaagtatacagtttccatggctcacagctaacctttgaaaacatgtaaatatacagtgtatgtttcatgaaatgacagagtaacgctaggatgaaactatggtctcaacttatctaatccctttggtacaatttggcaagatcttcttgggattgttataagaattttattgatcattctcctttcagatttcaataagacccagaaatgggtgtagttatggtgttgtgcatgtgtaacgtaactcacagttttttagggaggtatgcctaaattgcattataatgctttgaaaccagaaagaaaaatgaagccaggttttgtgcctcacacctgtaatcccagcacttcaagaggcttaggcaggaggatcacttgaggccaggagtttgagactgtaatgagccatgattgcatcatggcactccagcctgggcgacagggtgagaacttgtttccagaaaagaaaagaaagaaaacaaaagaaaagaagttaacatgtttcctcttccatttttctccaccatttttccccacgatttttccttttctgccaatctccacttcactgtgaacaaagagggcctctatcatcaggaaatctactcagctctgctggggtgctgacggaagagaaagagcagaagtaacctcaaagcaggttctaaataaacagtctcctacttaatgtaggataagtctttattttgctcttcattgcttccaaaattaatttctacttcaaatatattctttggggtttaataagtatgctccacatgttctgaaatatcagttttaaattgacaaataaatggccagtagaggtgacattggggacacatgagtggctgtcaataaatgttcagtaaacaaatgaataactccatgtggactgttatatagaccacacttattccatcttcttcatctaaaaaactcttattctgtctcttgggtccctatttaatttttttttccacaggaaggattttcctgactgctcttcccaaattaaattatgtcccaattatttgttaccgtagcacactaaaatgctgcttgatcttttatcatattgtattgggattcactgtttaatgtctacctcctccactgcaccggcctgttatgtgtggtattctgtccccactgcctagtacagtaattggcaaatagatacttgaactaaaaattttatggggaagagtggtcaggaagtaaatttcaacttgaatcagcaaaaaagaaatgaacagtgggtaaggtatgcgaaggaaaaagaatctgtggcaagagaagaaattaaataaaagaagagatgcttggaatggaatgaggggaaggtaaataatgactttgccatcagaacttcatgcctaaaccatggaagaagtaatgggcaccaaagcaagggaaggaagtagttaaacaaaaagagagcacagaataatttacagtaataataatcagaaattaaaatagaaatgtactttaacaaggaagatttcctccacctgtttttattcctgactttttcttttccctagggaaggggagagcaatgtgaagtgaaagtttgatataaagatttgatttaagacatgagtttttcttcaaaaataaaaccttatttcatagtaagtaaatataagacattgaaccattttaataaacagggtatctatctgttgttatgaactggtcactaactcaacatcatcttttattgtcagaagaatcataagtagtttacatattttaaaaatcaagttttggtttttagcattcacatatttttaaaactccaatgttggcaaatagattctatgttttagaagtttcatgaaaatgtgttctttgtatcattttgcacaaaaggaacatgatttggtatttgtttttagcaagtctgccaaccacacggagatgttctttaccacagactttacctctgcctccaattagaaaactatagcccataagaaatatcattgaaagatcaatgataaatcaaacgcctgtcagttgctacctctttctgaggggagaaggcaaagtctgctatagcagagccaaaccagtaattttataaagagatcagtcattttcagaaatctttaacccttattctttattgagttcatcacttcacaaacctcagtttgcacacacaaaatgagggtgcacatccttatcattttgagtccatttccctttctgtagatcattcacaggagcactttttaatatacagagagaattctatgatgtaaatttaagtttcttgtgactctaaaatggatcttctggctttaaaagcatagcatttgaagtagtcactaacattatcatatgaattgccttgtaaacacataacacataaatatggctaagatcagaagctgctagaaatcagtcatgaagcctctgagtatatggatgagcagacaccaaccaaagtagactgggatatactggagactttattcatttatcatagtccgcacacactgcacttgttttattttattttattttattttatttatttatttatttatttatttttaatttttaggttcaggagtacttgtgcaggtttgttatacaggtaaattgtgtgtcatgggggtttggtgtacagattattttgtcacccaggtaacgagcacagtactcaataggtagtttttcaaacatcatcctcctccactctccaccctaaagtgcgtcctggtgtctatagttcgcttctttgtgtcaatgagttcttgatgtttagctcccacttgtaagtgaaaacatgcagtatttggttttctgttcctgcattagttctcttaggataatgccctctagctctatccatgttgctgcagaagacattatctcattcttttttcatggctgcatagtattccatggtgtatctataccacaatttctttatctagtccactgttgatgagcatttaggttgactccatgattttgctaatgtgaatagtgctgcaattaaaatacaagtgcatgggtctttatggtagaacaatttatattcctttgggtatatacccaataatgggattgctgggtcaaatggtagttctgtttcaagttctttgagaaattgccacactgctttcccaatggctgaactaatttggattcacaccagcagtgtataagcattcttttttctctgcaaccttgccagcatcttttatgttttgacttttaataatagccatttagaactctatttttatttaaagtgtgaatgctactcattttttcttgttttgcccttattaccactgaattaggatgcttgttaataaacttctcagtaggtaatttcaaagtgagacaagtagttaatatgtgcactaagcaaatatgaaaataaaacacatgcctcatgttaaagctttatgaaaattgtgaagtattttacaatgtgagacgtgtatgtgtgtgtgtttatgaattaatcacaaaccattttgtgcctctagcaactttacttttcaaactaagtctttactattgttgttgttttaaaatttttctttcctcttagaaaatgattatctcaggacatatgatagctgagaattggggaggaaatatagaatgtctgagcatcaagtgagatatagatataaaatgccatctcatgcaggtcagccatatttaaaattatgtttcctttagaaaagaatgcacacgctgataagctatctcatataatcaatgggcatgacttcctgtgaactctattcatgctggatccctatagttcataacgataggagagaagaaacataaaaagctctcttccatttgataactatagaatcctggctaagtccaaagtttagccagagagcatattggtttcagcagactatggtaaagttaattaaggatgattaatggagcatttccttccaatgatatctgtgacagaacaaagctgtctgaggcttgtcaagcagaatttgagttgaatgagtatttatgtgatcaaatctgaaggctgcctcttgacagagcgaggattcatcaatcaattgctctggcttacagtggtgggaaattggtctatcccagtaggttctgttcccatcccccatttttttcattcaatcatccctcaggctacaatgcatctttagcttttacctctgaccaccttaaggtatatcagagaaaagtaaaggcaagagtgaaaacatctattatggtagttcttgtcttacctgaattcatacaattaatttctcttaagcagagggttataaagtgacacaggcctgaggaaggaattaactggcgttaataaaagttatctcacaacctaacaagaaatgattgtgagcctagtcaaaattatcacctttttccgttataaaattgtatgctgtttcttaagctactatagagtcagttaattctaaaaattgtctaaagaacaaacacagtttatgcggcaggtttttgctttagtcacattctacaaactgcagtcttcagacttgcattctcaatatgacggtcactggccctgcaaggaaaggccctgttgggcatcagctctggttagaccaagcattgatccacctggacagcaggctcatttcacctggggtattcaggatcttgtttaattataatggaacattgacaatgcagaggtgtgatccgggattagctaaaataggtatatttgttttacaaggttcttgcaagtgatttcatttgtattatttgatgatcacaaaaagttcatgcaaatagagcaggtatgactgttcttattatgtagatgtggaaactgaggttgaaagatgttctataacttgctagaatgatatagctgtatgtggctgagatgggacacagatccacagtcccgtctctaccatagtccttcatctctcttgtagactactgtctttctgggttgtggctgactgcttatttgcactctcaaatgatagcacaatatttgcacgcagaatgtaagtgtaattatgtatgtttttaatggtcaaagccacttaagcagcttcagtctgatactactttggcggatgctctatttaattctgaggttgaaagactgactgcaacttggagtggcaaattctggcacagcctggcactaggactcctggtgatttcagcggtaacactcaactgcatttagtttcttggcagtgtcagcatggaaaatacacaaacaaatatggctttccagatgtgtaagcccaacaattcctgagatatgttgttcaggaggaaaaaatatagtcatgcatgcctatatgattgttattgttgttgctgttatttattaagatgtttacaaacaagcttttttttaacctttaaattgcattttattttattttttattatactttaggttttagggtacatgtgcacaacgtgcaggtttgttacatatgtatacatgtgccatgttggtgtgctgcacccattaacccatcatttaacattaggtatatctcctaatgctatccttccctactccccccaccccacaacgggccccggtgtgtgatgttccccttcctgtgtccatgtgttttcattgttcaattcccacctatgagtgagaacatgcagtgacaaacaagcattttttaagatttttttatatagcagagaaggtaccttgttggtcctttatcagaaaattgcacttgttccccaaatcatgcttattcatcttgaaaggtacagtaactgattttataagctacattctcactatctttgaaaagcatatatgagtcattattcaataaaattttcattaaattttacttaaagattttgtaatcatttgtcattacagtattagtatttggaggaaaagtttgttatctttgttatttattttcagagtgcaacatgagacataaaaaggaacattatttaataaaagaattgccaatggattaggttaatttcaattagtattcatttctctttagtcttaaacatgtaacacttaactataacccttaaactaacactaaccatagttttatatagctataacttaaattgtaacaatgacttttaatttctaaaatcaaaacttttgaaataggtgattaacattccaaaaattcaaaatgagctttagctttttagccatgtcatccttgagaattaaatattttttatttaatattttttctttaaatgtttttccatgaaaatattgaaaggccttattctcatctgcttttcctttttagatattttttgtgtaataccattgaagacccctgtgcagttctaaaacgtctttaggctaataattccttattctgtaagatattttgggataggaaaatttatttattttaactttagagaaaaaaaaatccaaagatcagaaaggaatgactgaaagacagccattggcccatttgacaatgtcttctgatattagctcactccgaattccagtgatgttcaacaaatgcagagttgagaactatttttttccttcttatgaacactatatttctatggatactcttggatgttagaagctttgtgggtaattatatcacagtctgctatagaatttgaaagtctgtcaactatgattaagtcaagtctttgtccattcagtatttagacaattgatttcttaaacctaagtgcaggattttcatgtctattaaattttaaaaattaattcagacacatagctctgacctggtaagataatttaatatctagcttctgttattttacagactttctacttttaccccatgtctgctccctcccttaggcatgtgtcatttcgatattacccctgcccccatcatccaagtcactgataaaatgtctgaatggaataggataatttctaggttgctattgagccattaattaaccctgtttgcatattcttgagcccaaacatccaacaagctccaatgataaaaataaacaacaagatatcacttctatgttttgtgtgaatgcatgacatcaccttccaagttactgtaactatgtaggtaacaataattcaggggaggtctttatgcaagtttcacaggtcgcactgcaattgcaaagtggatagtcacactgtctgtaaaagtatgaaagtacttccaattggaatgaaaatctggtcattcagtgaacatcattaattttggtgagttggacttgtttaattaaactctcttgattaatcttatgtgattggaaggaatatggcaaatgctggtttggcagttggcaatttaaaaacaaaaagaagtgtccatgcataatgtccatattcttcagtaatactttctactaggctaatcataggataatagaacatagcacatttgccataattttgtccacatggtagataaaatacattaaaattaaataaaaaaatttgaggttttaggaaatgctaagaaaacttgctcagagaggaaaacttaaatatatatttcattgaagatattagtggttatgtctgaatgatgttacatttgatatattgtgtatcactgccttgaattgctaaacgtgttttacaaggttatacctaaaagatatgggctctgttattccaattcagtatttttagaaaaaatcttcaacagaaataaataagaaagcaaataaacaaaagttagaatatgagttcttagtgaagaagttgagacttcattccagacttataataaactgttggctgtgatcctcaaacctatgcatagtatttttcatttttaggttccttaacagtccagtaaatcaagcttttccattctaagaccaggtagaatcagcagagacacaaaccggctaatgccattgaaatggtacttacaggcttactccacccactctattctctgttcagtatctccgatacacatgcttctttttttccactttttcttcacaatctgacatatatctgcagtgtacaaaattccaccaaatcagattttagtgtttttacctatgtttctcctctgtttattacacagcaaagagatttatccttccctccctttctttctttctttctttctttctttctttctttctttctttctttctttctctttctttctttctttctttttttctttctttctttcttttctatctctttttctttccttcttctttctctctgttttttcctgtctttcttctttctctccttcatttcctccttctttccttccctccttccttcgttctttctttcttccacttctttctccctaccttcactctttccttacattctcctccctctaccaaaaacaacagaacaaaatccactcaaacatattttatccatcttaccttcagcctttattgtcctcctccatcttatctgatctattctcccttttcctttaggtctcaacgtagacctgccttcatctgggaagttttatatataccctcttggtcctcttccttcacccccatccctggtccaggcaggtgctcttctttactcctatagtcctgaatgtgcttgtttatatttctgcacccaccagcagatgataagtgccatggagctttggcctatggctgctttctttatggatgcacagcctgacatgcagtaggagctcaataaataacagggaaggaaagacaggagggggacaagtggagagaggggcaatgctgttttctaatagaaaagtatcttaagagctctctcaagttcattttcagataaagcacagctaccttccaggaatctgcagtagggatggtaaggagtcagcatcccagatgggaattggtcctgctcctggtatctgaaacagtgcaccaaatgccagcctttctatgggtaaaattgcctactctgtacatattgaaagtgtaagagtagatgtggccacctagtaagggtagatacacattgatatacaacataattggcccaaactgcctgagtagtcatttgtactgattttgtccccttatctctttgtttctggccatcttcaaactgtggactggggacctgggctgcttttatgcattgtacaatctattccaaacttctctgagttaaaatctttacctttgtttgtaagttggatgagacaccatgattaagatattaataattagcacctgtttgggagacaaaaatgtctgttcaaattttggatttatcatgtataaatgtgtgactttggacaagccacttctctgaactttactttcctcttctatatgatctggataccagttggcctgtgatgaggtttttgagatgatcagattcatgtaaatatattttgcaactctaagcagtatgaggtcacaaactgatatacattgatagcaggttcatggatattaagttgtccatcaagagtggcactgagtttcctttatcatctgatatagatcataaaataggagactttgcttaattctggagttatgaaatgggatttggaatgaggggtagctgtgtagagatattcatcagtgccatctctggttttgagtacctctggaaaagactcccgactttattttttgctaccttaaaaattcacccagatttttaaaataccttgagtcctgaaagtttagatttagattatatttatattatggttgagtacctttctttccttgcctagatatgtgaatactatttttgtgttgcaagtaagcttaaaaattgactgtctaaatatttagccagagttattttaaaagaatttcattatttatctcttttatgatttatattatcacattctgcgtctgtagttatgttttatcataagcagcccatctgctacaactgccaaattggaacattcacataagatgagttcagatatcataaacatgacaagagatggattacatttagtctttctccatgtttaaccaatttaatttgtttcctatgcagaagaggctctaaatttacttaatatatgttagcacttaggaacatagttagaaacaaggcgaaggtcttaacctattcgtaaataaatgagaagattcctgtcggagtgaaagagagagagagaatttatgtcaaacaatcaggaatttaatacatagcggtcttttaggatgtccagtttgtgtacatactcttaaggcatgattacgaataacttcacttcctataaacaatgtgactggagaaattactcacagatacaacaaaaaggggaagaaaggtaagacgttttaaccaaagccaataagtgaattactttccctgaaaaggttaaaaatggcagatttattttttgctgccataatatttgtctttgttgggccagctatctgaggtattctccagaagatgcagggctcattgatacatcaccacatgaccctaggttcaaagctacagcagagccccaaaggatttttttcccctggagtttggggactcaaggagccttaactgaaggtgaagtctgttggctgaatgaaagtattgatactgctgtagggaaagcgttcagtgattatactggatttccctctgcccctagtaaaggtcaagtagaagactttttagtgcaagcaaaagagtcattcatttttcactctttaggtaaaggacttatgtcatattattagtgaaaatgtgattaactgttaaagcaacataggtcttaatgatctataaggcaatttctctcaaagttatggattcattgctctgaagtactaaatatatgttgttctaggatcatgcgagtcatgaatactaaaagtaaaaatgaacatatttctttgatgatgatttattaccaaacaatttggggctaatacattcacattataggatgcaaatataaatgtgacataactgagtgggcctttaagatgaagtgtcattacttttggaaatatgggcagagctgcaacttcatcacagcctttgtaacataatgttttgagagactgtgactgatgtttcaacttgcagcagcttggtttctaaattctgtacttagcaagagaatggtttcattcagcttcattgatgacctaaaaacccatatgtggggatattatatgctattgtgaattagtatgcagagttggtaaaatgagattgggtggctcttttcatgtaagacactgagttcacaatgagcacaatggcagagtcatggcagcagcagacctagcaaaaaatatgatcacaacccgatgtccataaaggtaggcaccaatagctcctctgtaggctatacggaaatactcccggagtactgtgtcttggtcatacatcatagttatttttccatattaagacaaagacctgtaattacccctcggattactcagataaataaaaagctacacaaaaggtcaaattgaccttgttttcttccttaattctctatttttttcttctggtcctctccatcttctcattcgaagaccacaatttgctatttatctctctgtttctctcaatatttcttctgtttatttcctcttctcctttacctttttcttcttttattttaatctcctgtattcccccatttcatcctgtttcttgctttttgaatcagggtaggagatatgctgacattaagtatattaatagttagagtcttggcattgtcaagaacttgctcaaaggaaaaaaggttgtcaggtattgagagagaattgcattccttaaaatagtgattatgtgattttcaattttttttattcggatcactcattttattacgggaatctaagtagatcccttcatttctcagcaattttttaattggtacaataaataagatagctataatggtatttgtgcaaagctttaaaaaataagttggtaactagaaaagaggacagagggaagcaaatgatagagcaaagtacaaattatatgagcactgcagattgctatacaagttagacagccccagtgtgcgtctaatttatgtagctgataacccaagttaacagagaccctggcactattatggaggtaatattttctcaaggatgtacagtcttaaacaacttcttcctgtattaggttcatacatgcttttctttaacataaagcaggtatgtctggtctcttgttccatttcattttcttggaaaaataaatttattgtaggccagctgaatggaaattctgcttactgtttacgacagaacttgctctccccctctcctgtattacccagggaattagtttaatatagagtcttattccacacccatttctttatttttcccctctccatcctactttttagggttctgttcagaaactatattgccacagagcagctggtagcatttagcaaccacctgcacaagtagttctgtttccaatggaagaaaatttagcttacataaggcaaaaaattgtaacgtgttggcttttccatttttatttgtatttgtgtatattttcttactcattgatgaatgttctgctaagtgaaacttaactccttggtaaagaatgagaaacagtatggtgtagcagtcatttgtttcaatagcgtttggttaaattgaaactctgtcagtaaggtgagaggttgatcatagccaggaagagactcttaaaatctgcaacttctttgaagggtgagaaaggcaccctcttgaatttgaaacttctaccatgattttccaggtagtagtccccattgaagactatgaaaagcatcataatgtgtgctggattccaaagaacagcactgtacagtcagacttctaagacctaacagtaaataaattacttttctattgcttcggaacaagtttaaacctccaagtttttgttaaattgttcacctaactacctactgaatattgatcatcactgcactaccagtgactaatatatcaagtagcttgatgtccttaaatcaaggtagctattctgtaaatgaaaccctatttacaaataatatctgctgactaacctacgtaaagacgactgcagctcataagtcacctttgcttgcctctctcatttaatccccaatcatcactttattttctaggtggaggagctgagtcagagcaagactaagtgacttagtcaaggttcgttagttagcaagtgtaaactcagacagatttttaacatagtcatttgaggagaaaagttcagcaattctatttttttattgaggggtaaaagttactgggagtcacagaatatagttatgcagttattacattcagaaatctgaaccatgcaaataaatgctagatttctttttgaatccaattttaaaatggaaaagatcctagaataaatttaatatgatattttggctttatagattaacaaattacatgtatgaccaaagtcacccaatagttaatggcaatgctgaaatgggaaccaaattagtttcctccctccctccctccctccctccctccctccctccctcccttccttccttccttccttccttccttccttccttccctccctccctccttccttcctttcttccttcctttccatctttccctacctttactcatgaccagctttcttcttttctcccttatttctcaaatgttttagcccatatactgagctggtcactactcatctaagctaggtattggaaataagctataactacatcagatgctttctctgcccttaggagatcaagtgagggacacagtccagtgaactgatacagtgctgtcatggcagaagcataagatactaggtatgggcaatggttgggtgagatacacaaccaagtccagagggagtcagagatagtttccttgagggaatattgtctaagccaacacctgaaagatgattattcctttattccaataaaaggaagttgtataatagcagaaaatgatgtatagtcatcagcccaaagacaaaagaaagcatggcagagcccatgaactgacataaattcagtatgagtgtgggagggcagagagaagaatgagagaaaagactcggttgaattacccttaaaggtaaattgaattcagcctggcattagatgcttgttagacatcattaggaggtgtgcaagaaaatactcttaaattatgatagaatgatctagggtagtgaatgatagaatagtaaatcccctaagagtacagattatgaacttttcttggagtttagaggcgaaagaggttattgtgaaccgtagaaaagaagccttcaaggaagacttttaaagataagtaccatatctgcaggacactaccttattgcatttcctttcttcatgagcaaatagtctttgctgtttgtctctatctcctcaatttccattcactttttatcttattgcaaacttcattttgcccacaacacctgaaaaggtatgtaacattccccagctgccaaacagagtgtcagtttttcagcccttcatcctccataactttcgtgggacaattcttgcctcttggactctatgtcctctctggcttctagaccacggttcattcacttctattctgctcagtctccttttctgggctatccttattctcccctccacagttctcaaatggtgtttcccagggtccacacttcagcaccttcatcttcctgtccttgattctcctgggtcatgtccattcaaagatactatctacttatccattatagactcctaaatcattatcgtaggctctaaacctatatttctaccctcttgcttaatatctccacctgaacgtttccgttttgccccacgtcaaataaagtgaaatatatccgccctctccttattccttttggggttaataggctcaccatctaccttatttctcaagctggaatttagatgcccaccttcccttctggcactccttttctcttctcccatgtccagtgatttgccaaatgtaatggtctgcactccagaaatatttcttgattctgcttaattcaaatcactctgcctttcccttaatttaaagccttaccacctattgctaggactgcatgtaagagtattctaaatggtctcctttccatttgagaccctcctttttaaccatcaaacctgagttaaacttttatttacttaaggcattactctggctccctgttgtccatagcagtagtttctcactgtgttctgctcagtcccaagaccccatgggacgccttaaagagtagcactggggaagggaaagccaggtggattgacctcctagctcctacctcttcctcaggaaatacaccatcactttttacttgttcaatatttctgggtttgcttaagattttgcttgaggaaaaaaaatgtattctgcactaaaacattttgaaaattagaaagccagccttgttagactgatatacatggccctccgtgatttaattccaaacgtctttagcttcatttctcccctttctctgcccctcaccctagtcatcattcagaattctcctgaaagcattgtgctccttcaccactgtgtgtctttgtttatgttcattttctccctttgaagtccatggtcacgtttattcttctttttccctaccttctctaccaggcaaattcctggtcattcaacacaaatcttactcttgtagctgtccctgagaaagtaccctgcagaaagacattcatcataaatatcttctacagtcctggccaggcgtggtggctcaagcctgtaatcccagcactttgggaggccgaggcaggtggttcacgagatcaggagattgagaccatcctggctaatgtggtgaaatcgcgtctctactaaaaatacaaaaaattagccgggtgtggtggcgggtgcctgtagtcccagctattcgggaggctgaggcaggagaatggcgtgaacccgggaggtggagcttgcagtgagccgagatcgcaccactgcactccagcctgggcaacagagggagactccgtctcactaaaaaaaaagagaaaaaagaaaaaagaaaaaaatatgtatgtgtgtatatatatatatatgtgtgtgtgtgtgtgtgtgtgtgtgtgtgtgtgtgtgtgtgtgtgtgtgtgtgtgtgtatgtatgtatcttctacagtccttaacgtatcagttgcttctacctccagattgctttctccctgccttcttggaaggcaggaagttgggagtggctcttatatttctaccccagcttatagcttagtgcctgtgaggcaggaggagctgctcagttcatatgacctctggctcctcctcctcctgctgttgctgctacaatggtgaagccaaagaacatttttcagcaaaagggtgaaatatcaatagtggcattttaggtatttaggatggttgatcttaaaagtcaagtgcaggttgggtaagaagggggaaatctaaagtcaaagagatagggatctgaaggagattcttacaatagtaaagtgtgcattagattaaaatctactacagattcattgctgaattaatgggatgagagactatgtctcacaggagaaaggtggaaggttgaaatgtgttcattgtcttcagaaatcctaccctatggcaatgagtgcatttcttcattccatggagtccagattaatccagataagctcactagccctctctatccccatcacatagctagggtaacagtagcaacagcaacaacttgcctttgttactatgtgccaaacaatgtgctatatgcttgacttgcattacctcatgagagataatgagattagcattataagtactacagtataatcttcactttagagatgagaatcatgaggttcagcaaggttaattaactcgcacaaagcctcgtacctaagaagttgtggacctagggcagaaattcatgtatgtcttagtcctgagccagacctcgactccactttctgctcaatctcaacaagctctgtttagccaagtattttttttttgtatctaatatctgaatactgataggtgttcaagtagcatctcatttattaatgcaaatcaggaaagttagagttccagagaagtgaattctcaatatatctgaagatcatctgtttgagccctgtagcttccgtaacgttgccattaaggatgaaaacttttctaaaatcattagtacagaaggccagatagccaactgggccttgtttgattcatgtcctaaatcaaagcaaattgacaccaaatgactttcttttaagaaaagtatataagctttggcacatgtgcttaatctctgtgccaccaaaattaaagggaatttctctacacttgtgagttcttggctgaatgtaattgaagttgttagatagcatccctgtaaacgtagactcacaacttgctttgctgctttaaataagttggatctctactgttttttcaaagtgtggtcagcggagctcgtgcatcaaaagctgtgatactgttttaaaatgcagattgctggacttaatcccagatttataatttagaatctttgggggtaaaacctgagagtctgcttgtttgtatgaaataacgaacaccacaaagaagagtatgctgattgtcttttgaataaagtgagaataaaagtgccaagcacagttgttaaaatatgcagacatttaataatagctgttagccttggcagctctattttatattacaccctgccaaacgcctttcaactagttactttcagaggtaattaatcgtaaacatctcagctctgtgaatatttagactcagttcaagtagctgtagcacctagcaagataattcctcttcctatccttcatcttgttatttagctttgatttgtatttttcatctccagatatagaaaaatagttttctaaggtcctcttctgagcaagaattctgtatgtgttttatcatttaattctcataataacctgcaaaaaagacattattagccccattgcacagatgagaaagctgaggcttaaatagcttaattaatgttccagggtcacagaagcagggagttggtttgaatccaagttcgcctgactccataatcctgcttttcctcaatatacagttgtttcttctcatgtgtctccttacatgatagatgcaggtataactacagtttaagtttcctatccaggacctctgggtcacactgtcactaaccctatttctatgacacatctctggtacttttggaatcctcactttactcacaaagttacacccttgggaaaagcaggtaaatggtatcatttaaagtttgaggcataattgaagtctggaattatttttagtagcaggtttttaaaaaacaaatctcactaacctagttaagagttggtgtgtggaatcaagggctgacctgttcctctggaaccattgctgattttttagtcagtgctgagaaataggactttctagaaagatgaaaatgttctatatctgcattgtccagtacagctggcattggtcacatgtggttactgacctatatggttaatggcactaaatagccaaactattaattttgattttaattaatttctgtttaaatttaaataaccacatgtggctagtagctgccgtattaggcagcataggtctggatagatctacagaaagacagttaagtcaagtagttaaggattcaaatctggagccaaactgactggctcactagcctgtgtgactttgagtaaattactgggcatctctgtttttcattcccttgaatataaagtgtgattaataatagtatgtacctcacaggttagttatgaggattacatgagtaattttataggaaaatactttgtataatacttcacacatagtaagagctcagcaaagttacagcagttattataactcttattagtttcacttcctacataatttaagtttgcttgcctttttttaagactggaaatctccttagaagtgttgataacatggtagctgctaaatatatatttattgaattaaatttttgacatctctccgatttggaacttttgatacacacagcctgatatatatatatatatatatcatctccacacacacacacatacataaagagaatactggaaaggatctcagaaaatgccttccctttttgagatatacaataagaaagtgcaagtctgtggtcaaaatgaatcagaaggaaagaaggtgaagaagctccaatacttacaaagacaaaacatgaaatcctgtcatcttttgtctcatgcaactcaaatactcaggatctttaaaaactctatttgaagtttgaaatgtatgaggaggtgatcaaggaaagggccatgttaacaggacacatgataagtagtaggaaatcatttcttatcaggtatattacaaatcaatctttgagatatttattggccagtcattatgtaagtaccttgcgcatcaaaacatacacacatggctaaagggacttgtatactacacatagtgtgtatgtatacgtgtatttgtgtgtgtctatatatatattaatattgacattaaaattagatggtaaaaccttttcatttagtgccaaccaagtctagccacgataaatcaaaaatgtgaactaccttggcaagccttagcttataaagaccttacaaatagctatacaaataattttctaaatggaaataatattgggcctgaactttaaggtattatagataggaaagagaggaaaataattgcctttttagtttgtgactatattgtaaatgccagacaacggaaaaactagtaaaattaaaaaggaattccgaaagtaaatcaacaaattggctgaaaattgtcttttttcttcatctgcattgtagattaaggttgactacattaccaatgagtcattttaatagagaacaagtcacactgcttggtttatgctgagctacaggtctaggactgatggggagtcctgggggaggggactcagcagataacatactatcaatgtgagcttatgactgcttagttgacagcttaaaaagagagaccggctgctggactgaaggaaatataatatgtccttttaacgagctgaatttgaaaaactttttgaggaaaaaagaagcaaggtattcatgaagggctttgtttatcacagttgccagtctacatctttattagcttgtaagaggtgccaagtgtagatatttgtcagtttactgtggagtaattctgtccttttaaaaacttttagtggcatgatattgagatggccctattgttacattcttgtttaattgttgactttgtgttgattttattattcgagtaggccccacctattgttttagaggtcaacgagctttttcattgcatttcatctgaactgtagcccctagtcaactgcactttcttcttaggcaaacattccgcagcagctgggttggaaactatcattccacacatcacagcaaatcttagacaacttgagtttaattattccctgttgactggctttgccattactaaaatctcttttaacacactagcattgagagtggaagtgtagggtttcttagctctcagcacaatagcttttgcattaatatctcatggcttatttcatagagcaaaggcctacttgtggtctttaaaatttgtttaaacataaattacaaagaaaggcatgggtgacacatagctatatatagagaaaagaaagcacatgagtagccttagatactttgtaaagagtgaatatttcttaaaaaataatttttttgcctttcaagtgaatgttaaagggatttttaaccacacttttgtttttcctagttttcagaaagcatttatgttttattactctgttaaataaatattgtgggcgtagtatattaaaaattgaacttttcattttacttaacaaactgtaatttcatgattaatagtgcttaatctgaatgttctgtgaaaacttcgtacagccaaaagtgttcagtgttactaaagattagccacctcacaaaagagacagttatgtaattgttttcaagaaggtttgtagtctttagagttatgagaaaaacaataaaacattggatgttggatatctagcgtaacatatcctaggatttatcacaacctagaaattaagtaatacagaggaaaagaactgaagaatttatattttaaaaattcattttgaaaaatcaaacatggcagaacctatcatgggggcactattgctttcaagattatgtggggctggtgaacattatcttgaagctggcaaacatgacctgattgcactaaatagatggccagaaacttctcttcttagctggctatacattgtcctccccaagcttcaagcttctaggttacacctgcagaaaccactggaacatggtaggatggactctgagaaactaatgtccttcttgatgatgattcctcgactctgctctatttgggagataaggcacatcactaatttcacaagcaatctgattatatctctcctctgtcaaaaccctccaggggtttcccactgtgttcatgataaagctcaaaattcgtataatcactcatgcggccctccatcatctggctcctgcaaattcttctgccatctttgtacattcttcgctcagttcctgaatttctctcagttccttaaacttgcttgcaggctttcacacatttcatatatacatgtattccttccttctttcaatatttattgaatgctgactgtgtcaggcactatgctgattgctaaaggctatgtaggagaataaaatagacatggtctgtagcctcctgaaatgtattaactactcaggaaggcagaaatgggaccaacagttacaaaacctgttctttcttctttttatcttgcgtatatctaccacattctttttctcttttttgtttttttctcctttttttttttgagaccaagtctagctcttgtcgcccaggctggagtgcagtggctgggatctcatctcaccgcaacctctgcctcccgggttcaagcaattctcctgcctcagctccccaagtagctgggattacaggctcatgccaacatgcccagctatttttttgtatttttagtagagacagtatttcaccaggttgtccaggctggtctggaactcctgacctaaggtaatctgcccgccttggcttcccaaagtgctgggattacaagcatgagcaaccgcgcctggtcctcattctttttattgttataatttttattattttttaattttactttaagttctcggatacatatgcagaaaatgcaggtttgttacataggtatatgtgtgccatgatggtttgctgcacctattgacctgtcctctaagttccttcccctcgccctccacccccaaacaggccctggtatgcattgttcccctccctgtgtccaggtattctcgttgttcaactcccacttatgagtgagaacatgtggtgtttgattttctgttcctgtgtgttagtttgctgagaatgatggtttccagcttcatccatgtccctgcaaaggacatgatctcatttctttttaaggctgcatagtattccatggtgtatatgtaccacattttctttatccagtctatcattgatgggcatttgggttgattccatgactttgctattgtaaatagtgctgcaataaacatacgtgtgcatatgtctttatagtagaatgatttatattcctttgggtatatacccagtaagggaattgctgggtcaaatgatatttctggttctagatccttgaggaattgccatactgtcttccacactggttaaacttacttacatttccaccaacagtgtaaaagcgtttctatttctccacagcctcaccagcatctattgtttcttgacttttaaataatcgccattctgactggcatgagatggtatctcattgtgattttgatttgcatttctctaatgatcagtgatgttgagctttttttcatatgtttgttggccccataaatgtcttattttgagttgtctgttcatattctttgacaactttttaatggggttgtttgtttttttcttgtaaatttgtttaagttccttgtaaattctgggtattagacctttgttagatgggtggattgcaaaaattttccaccattctgtaggttgcctgttcactctgatgatagtttcttttgctgtgcagaagctctttagtttaattagatctcatttgtcacttttgggtttttttgaaattacttttggtgttttcatcatgaagtctttgcccatgcctgtgtcctgaatggtattgcctaggttttcttctagggtttttatggttttgggtcttacatttaagtctctaatccatcttgagttaatttttgtataaggtgtaaggaaggagtccagtttcagttttcttcatatggctagccagttttcccagcaccatttattgaataggagatcctttcctcattgcttgtttttgtcaatgcctacctcattcttatatttcatgttgcatattaaacatcctttcctgagggagacttccctgatccttcccctgtgtaagatcctcttgatatatgctaaagctagcttgtccaacctgtggcccaagatggctttaaatgaggcccaacagaaattagcaaactttcttaaaacatatgaggggttttttttttttggtgtgtatgtgtgtgtgtgtgttgttttttttttctcatcagctatcattagtgttagtgtattttatgtgtggcccaagataattcttcttccagtgtggcccagggaagccaaaagactggacattcttgtaaagaaataaaacgaaccatattagcagaaactagacctgaagaatttataaaagcctcacttgactctgtgacttctaggttcttcttcagtttttattggtcatcttccctcacttagtgatatttagctcctgtggtttaaagccatgtcgagatgtttgcatgagggtctgccatagaaggaagagaagaatacatctgaaaagcatagagggaattattattgagtacctacccatcttaaatattttactcctattaaagtatttagtctttatacaaacattgtgcgacgggtctggagaacatagcacaagagcacagaactctagaaatggtccacttaaatcagattctgctgctgggacctttccgtttcttcagttgtaaatgggaaataatacaggttgagtgtccattatccaaaatgctttggaccagagtgtttcagattcttttggattttggaatatttgcatatacataatgagatatcttggggatgggacccaaatctaaacacaaaatttatttgttttatatataccttatgcacataacctgaaggtaattttatagaatatttttagtaattttgtgcatgaaacaaagtttgcaggcattgaattgtcagaaagcaaaggtatcactgttttagccacctatataaggacaatctgtggtgtcatataggcactcaaaaatgtcatattttggagcatttcagactttatatttttggattaggaatgctcaacttgtagtatttatttcttaagactattgggtgacttaaatgcaataatagatgcaaagccatgaaaacatgcctgatatgttgtaagtgcgggcttttgttattctcatgttatatatgaggaaaaagacttgtgagttgggtaacttgaaaattgtagagctagaaacagaaagcaacagaggtgggattggaacacagttctgtccaatttcagactctagtatctattctctataccagatgggtaaatacccaccccgattgacaaaaaaggcaatcaataggtaccagatgagacagagtctgattttaaaagcctgagttttaagaagttgtcttcatgtctgcttttcatgaataaagttgtgcttgatctcttatgtaatgagtagcagtggtcatttgagtaatgtggtagatggtggcataaatccctaggaagcagaatattcttctgtttaattttaaaatgctgtgtgtcaggttcagaagagaagaaagaaatgacctcgtcttatgctaacaagttgctttctcctaacatactttcaggtggatgctatttttcagaatttccgatccaatatcttagagtgtgcaagaaatcatgatttagcaataaaatccctgcattaacctgatatggataaaatatgtctttaaacaattgtcaatactgaagtattttgatataactgatgtttgggcataaacttgagtctagatttttctttttataaagaggtttttactcaagatttttcttgcatcacattctttgcaattataatttttctacctgtccttgtagtccagagtaattagaaaggaaacctctgtagttttgatgtcatgcattcattcttgtccattacattagtaatgtatcagtgccagaaggaagtgcttggtggtaggatcattgccaatttgttcaaaatttagttccactttaattatctaatataagccagagacaaaggtccctaagacatttttttctggtcttggaaatactagagtttactggcaaaatgtatatacatgaatagatacatttaaaaataatacgtagacttccaattgtgaaactgtggaagcataccaaaatgcccatcactgggagtttgaaaatttgccatcatttctggagatgaaatctttaaaatgataagcatgagttagcctggcaagtcaagggtagacaggatatgctgggcaaagagacatttgccaaagtaaaggctcataagctaaaactttggttcaggtaaatattcaggtgaatatgaggacttacaatcccattagtacttataaagtccaaagtattacatagaaagtaacagagcatgaatgtgacatggtggttgaggctacatggagtgccttaaatgtcctgtgaagttccttggccttcagcccgtcagtgtaggtagtcacatacagatagtcattcaaggactttaagcagggaattaacgtgatttgatttttacacaagataaagtactctggctatatttggcagaatggatcgcacctgagcaagtctggatgcaaggagctgggtgctataaaatgggagaagacaagcaatagtgagaagcatttgatacgagaaatattttggaaatgcaatcgacaaagcttgaggattggctggatttgggatctgagagagtcatagaggctaagatagtacaagccagagaaagagagtgaacacaaaatgttttcagagttgccagactgaatttaagatgcctctgggacaacaggataaaccagtttggagttcagaggtgagcttgtggttagaagtattgtcagggaattaccagcattggggagagagggaggattaaagctttgagagttgttggaagagagcctagtgggcatgttaaagggagaataggctgaggataaaatcttggaggaaattcagcatttcctcagctagcagagaaaatgatcccaggagagcatcctgaaaaataatccagagaagtagaaaatgaaccaggagagggtgggtcataaatgccaaacaaggagatcatttcaagaaggaggaagtggttgttagtatcaaatgctgtaattttcataaatattttatatttgttcttaagctcattttttattgcatttattggtgatagaaataggtattacatgaatggggccaaaatgaaaataatacatccttttcttagagtaaactatggaaaaatcacattttgtgtaaatataataattataataacaatcctttaactggtagttatatagtatgtagggtttataaagtgtcctcatttccagtgtcatttgattttcacgagaatccaataagacaagcattgggaccttatttttctccttttttcaattgtagaagctgatgcacattgaagccaagcaacttgtcagggcttgctgccggttagctgtagagcttgcacagcacagtattatgtccttagccccctgacccactgagggttcatgataccatgttagaaatccaaacatgactaattgtcctttagcctaaggacacaaaatcttcacatccattcctcaggtttattctttcctcttagtcattatcattcaaaatcttcagtttcataaagttgcaatagtcaaaatatcaattactattttatctaatctcttgtgttccatttttcctatgtatgggtaaaattacagctgtgatttgtttcttctgagattaagtttattgggggataatttttatatggataggcctttaattttatatatgtatacacacacacacacacacacacacacacacacacacatacaagggtacctgcggaagtaaatgaagtgaaaacctgtgatacagtggaaagtaagaaaagacattgacatttgtcagtattttgtataacattgggagataatatcctgaataaaataaataataaactgtaaaaaaacaagaaaaagttaaatccatgtttattggagatagcatgattatattacttgatacaaacatctaccatccagttcttacacatgaattacatttttctttcagatcgaatcatgggaagattttttttttttggtattttttcatatatcactcttagtaaaaatttatagtatccagaacaaagggagaatttctattctttttattcctcagttctttctacatcagtattgcctgtttcatacagatttcacaggagtttctctgtcttatggtctactttggatagaacccattgaatgttggtttaatttcctattgctcattctggaatgacctggcattcctttagtatctatgtttcctctcttgggagctttctattttgttagagtcagttctctgtcttcccttgagaaaagtaaggccaaaagttttcccctgccctgccccttcatctgtattttaatagtttgctcttctaggccagttttcctgtttctctttgtggtctttcccattttacaatagttgaggaatagcttcttatccttgttattatatattttcatcattgccttcctttggaagtaatataaaataagtgcttgacaaatgattatcaaatgatttattccaataattatttatttcatttataattattttcattttttggataaatttctaaataccattttaaggtcattttttactactctttttaaaggattacaatagctatggtataaatgttaaagagctttataactctgtcataaaacaatatttctaatttattttctcaaatatgtattggatacctactatgtacaaatcactggataagacatgaagagagacataacgccaagggtcctgtctttaacaagaataaaggttaatagagagtccagagtggatgaaaatctggcagcctaccttgagttactggttcttattaataggtttattcatgagaaccaaagcaattcaattcattctcatatattcagtaaatgttcctaactaatagaaaaggacaatagcatcttacaacatatttttcttctaaaccttcattattgtttctttgccacaaaaggtattttctgatagaaaattagtatgtataacattaaattatgcatgtgtatacttagagaagagaaatattcttaaaataatgctaataatttataagcatacagtgacataaaaaagaaattccaggagtacctttgaaatcttcctattaatttagcaacattgaaagcagaatatccattttggggttttatcatatctatatggaaggctgttctgtaatgtataaatgaaacactgcccagtggatttagaatttagaattcaaaattgagaatcaaattgtctatggtgtgaaaaaggacattatgggtagaacctcaaaaccatcaataagttcacttttaaatgggttaatagaattccttttcggctgttgagttcaacagtgtcaaggggaaaagctccccagctgatatttttatttgagggaacacctagttctcccaatcctatgtaaattactgtggggattccctgtgaagctttgtggaatgttgcccagaattagagaaactggctcataatgtagactagagaaaaaaaacatagttctagccactttgtgttgaatggaaaaaaaatattggccaagtacacatattcagcatccacgaaagtgtatatacatttgagctgtgacttcatctgacttgctacaattaagtacattgggaaacaatgtaattcgagggttgcttctgagagaatgcagacgcttagctttgatttttttttttttttttttttttttgacagagtcttgctctgtcgctgggctggagtgcagtggtgcgatcttggctcactgcaacctccgcctcccgggttcaggggattctcctgcctcagcctcccaagtagctgggactacatgcgccaccacacccagctaatatttgtatttttagtagagatggggtttcaccatgttggccaggatggtctcgatctcttgacctcgtgatccacccgccttggcctcccaaagtgctgggattacaggtgtgagccaccacgcctggactagctttgacttttaaggtctgatttagaacagacagttttaatgattaaaataaacatctaaatccacagaggtaaaaatagagtggtttgatcaaaagagagtttgtaggcatgtatatgaaatagcttttgtgatagtctggggatttcatttccagtaggaactacataaatgcctaaatataattttcctaaaatattacttaattaggccagtagtaagatatcatctaggcctttgtattttggctggctggtatttgcttctttcccatgggaaaaaaaaaaaaaagtagaactgtagaactgctctcatatagaattgaatagaacagagtatcttgctgaccctctctgtttattaaaataaacttctgataagatggttaaccaggaagttgaagtagttcagggaaactaaaggttacttcttgctctcactatctggtgcacattatttcacattttggaattatattctgaaggttttttttaagtacaagaggtactgagttttggatgacacttaggtttcttttccatgggtactgaataagtgagaaaaaatgtcaatatttttatttgtattaacactcctgagatcagagcaaacatttagtaatatgagagaaagtatgccacctggattctggaatgtctgcaaagaacatagcagaacatgtttgaaagtaaaatcaccatcatttacattcataaataattgtcatatcatattgattatttcagtttgaagtaatgaggttaatttaacttattttgataactgcgaagactgattttcttatcatagtttcaagtctttcttctacttagtattactgacccagggaaaggtttgacctgtgacccagaatatgatattaagtattgtgtttctgctaaaaatcatgtgtaattattttccctacactaaatgataacgtagaaaacaaattctttttgaaagccattttcctcaggtaatgcacactgttaaatttaatttagtatgtgtttatggagtgaactagtgctagatgaagaggaaacattacctataactttttaaaaagtggaaaccaaaacctgagcaaatataattttatttttgcctgcatatttttctattaataatatgtctaaattttatctatattatatgaagatattttatctataacaatctattctatttttatctaaattttctctatcattttatagataattttatctataataacctattctaaattataaatgttttgattttattttctttgagtttttctttatgttaaataatgtacttttgtatacaaatttgcatttttcccctagtattccaacttttttttgagatttgccaattgtctggttccaaccagaagagttccctcaatgaaaactaacatactatttatttatagccccctctgactataaggttcaaggaccaagaatctaacaaagtgaactaatgatctctccaagacagtttttcttttttaaaaaaagattacatgtagagtcatatagaacttttaattctgtataagaagtgtatttataactttttgatttgcccataactaatcattatgcaattgatattaacaaatctgacctaacaggattttaatgtaaaaactggcaaaatttattgatttcaaagctacaattctttaaactcatctctctcagccaaatgaagataacataataccataatttaataaagaaccaagtagtttaatttgaagaaatggaaccaaaaaaaaaaaaaaaaaagcaggccaagtgtggtgactcatgcctgtaatcccagaactttgggagactgaagcaaggggatcacttgagtccagcctgagcaactaagcgagaccctgtctctaaaaacaaataaacaaacaaaaaacacaacaaaaaacagattatactgtaaggtaaaaaactattggcattatctccacaatctaaagcatttctaaataaaactgattatgaaaagtctaaaactagttttaaaatttcttctaaaaaatgatcaaattttttaacaatagaattgcaattgttttcacgtctttttaaacccaggccatgtttacatgtgacaagctgctattccctctcattgctcatggatgtagaagaatgttttaaagatatattcttttaccgaatcagagtcagtcactgggtggatactaacactgttaattgaaataggcaacccgaaaggacaagtactcaaaagtcattcagagtatagatgtagatttgtgtagattctagtatgttttattaaaagcaattttgaagctgtgtgtgtgtgtttgtgtgtgtgtgtgagtgtctgtgtatgtgtatatgtcaaacatacacaatcaatttttctatattagggttacatgtctattcatagaagtatagatcacatatctgtaaagtatactttcaattatccaagaagacattgactttttatggaggaggagttagaagatggtggttatggtgaaaagcaattatagaggatttgcaaaagtaatttaaactactgttaatcatctgaatcatctacatattgggagttgtttattgtgtagaaccgcatggtagataataaataccatggtgtcttttcttccatcatgcgggaccttgagttccttgaccaatcacacacatcttggagtaatgctctatttctccactccctgcccatccttagcccatagcaatggctgaccacatagaaaaggctggaaagcccaatggcttgcagtccaactggaggagttatgtgaggaggagaaggcacagggggtgaatatgcagctgggaatttccatctaatggaacttctaaatgagaaacaaatagatgcagaaaaaagtgaaagccactatgaaacaaacaataaataacaacctaggcaacatggtgagaccccgtctctacaaaaatttttttaaaaattagccagacacggtagcatgcacctgtggtttcggctacttgggaggctgaggtgagaggattgcttgagcctggaaagttaaggcatcagtatgccatgattgtaccactggactccagcctgtctctggcaaatttactgatctcacagctacaattctttaaactcatctctctcagccaaatgaagataacataatacaataatttataaagaaccaagtagtttaatttgaagaaacgtaataaaaaaagggccaagtgcagtggcttacggctgtaatcccaatcctgtctcaatcaatcaataattataaaaatagacaataacatttttgttatttttttgccaagcagtttacacaattatgtacatttatgaacacagtttatttttgtagtttgcatatttagtgcatgcaaatgtttgaactcttagtttactcttttggatataaaacagtatacctattgttaaatgtaagatgcaatttaactcgtacatttgcagtaaataacaatattctgtctctgtttttacatggattatttttggttttatattgatttgacatattgcatgattgctattcactccctcttcattaccttgcttatagtcacataaataagtacatagatgtattatcatgcacatttttacctgggaaggatttgaaaataatttaaaaatattaatttgttttgaaaaactcttgtgcatttgttcggagtgacgttaaaagagtgataaaaatttagacaattcagataatgagccctggaatgctcagtaattagcacctttgagaaggctagagtcctgaaaataagcaacgcactccccgcttccctaccatgctgttattattattgttccagtgtacattaacctgttgttttctacagccaccacacaataaatagaaagccattggcattttttgaagaaaagttttatgtttcattcaagaataaattctgtcagcaaccgctgctgcaagcgttacctatgaaaaacctgtgatactaatgggaagctattaagatgaacaagtgaaagaacaggaattaaaaagagaatttctccctacagttagggaggtgggatccttcagtgaagagtggaattcatgatagacatagtatgacccagctgtttgggaacattaaaaatcccttcacttaagctgttgaaagctgaaaaaaagaccaaatgttttccatctcaaaacacattttacttagctatgttttgaaagctgctatctaaacattttttaaaaaaataacccagcatattttaacatgattctttccttgggtgcaaatcagcagttataatttaatttaggaaagagagtgaaaaatgtagaaggaagagccacattttattcctctaccttcttgtttatctttccttaaagtacttaaaggacataaaacaaggaaataaaaaagtcactagcatacagttttgttagcttatcttgtgaacatttaacattatgcctcaaatttcgtatggtacataaagtgttttgccttgcaagatcgtgtatacagcacttcaaaaaagccagggggacagctcactaaatgtaatagatgtgtaacagcagatctttagatctcttgtatttagcatgacaatgttgggttctgtaggtgctttaaacatgatctctaaaaccacatacttttttcctagtgatgaaaaacatagactaattacacacttctggtatgctatagatggcttgaccatccggtacaattgcaatgtttggttatattgcatctccttttgtcactgaaatcaatcaattttacaacttcattttcttagtgcattttcatgttaattttcactagaatgaatgctcaacttaagcttagttacggtttggaaatgtttgtcaaatggtgcagtaaacagtttacttctattaatagttttaagaggtgaaatcttagatctttccgatgacatgtatctatatgtgtcttcaccaaaatatttaagaactttcactaagcgttttcaaaagatgtactgaaacagaggaaccaattcccaccttaagactcactttcataaaccaatttatttcctgtgaaaacctatgttgactactatgtagacaaaacttttgtcagggaactttactaggaatgtagctcagacaaggaatatgacatgaggtcagtgtcatccacccaggatgcagaccacaagtgctttttgatgataaaagtacaaggaagtttaaaatagtgtaaataatcagataaggaaacaaatagcaaggacagatatgctagatttaggaggaaaccaccactaacaaccccaaatgaccttccctgagctatgagacataattatggtttaatgacataatgttaaaatcaaatataattgtttttattagcatacattttatgacatagattcatagctggggacaaaaaaaattattttgccttcttttatttttacctttgtgtttttagggaaatctaagtgaaaaatgtaagatgaagatagatgatttttttgtagggtcacttttgagaaccttagtagatcaaaattttacttccaagaagtgcctctctccctgtattaagtactgaattccttttcgcgtgtatcttttcctaaaagactgttgtattagtcggttttcatgccgctgataaagatatacccaagactgggcaatttacaaaagaaagaggtttattagacataccattccacatagctagggaggcctcacaacagggtggaaggcaaggaggagcaagtcacatcttatgtggatggcagcaggcagagagagagcttgtgcagggaaactcctgttttaaaaactatcagatctcgtgaaactcattcactgtcatgaggatggtgcaggacagacccaccctcataattcaatcatctcccactgggtccctcccacaacatgtgagaattatgggaactacaagatgagatttaggaggggacacagagccaaaccatatcaactataatttaaatatatttaatcaatgagaagctaattgaaaaaatagcatgatgccacaaaccaaacattggttcaaatttgttcttactttgattaagattgagccttggcaaaatcatgttgcttcgctggcctccatttaattactagtacacagcatagattccctgatgtccccagagtatattttggtcttgaaaatacccccagtggtgtttcttttattaatctaatgtttattactaaactgagattaggggtcctaagagtccctgtcagtcagtggttggctcggagtgaccttaaatgccaactcccaattaccaaggacatagtatctttggcatcttaacagaccagtctttcaggtcattatgtctgaaataatgtagccttggaaaagaacatggcagaatatacaggcagattgatcagggtttgaatcccatttttaatacctaccagttgggtgactttgggctacttctatactcaatcttattgagttcagttttgtcatctgtaaaacaaggataataatcaccttatagtcagtgagttgttacatgaaatgatgtatactaagctttctacatagaataggcacttaataaagattgtattataattactattttttatcatcttgccagtgtctattacttctattacttcaatgacttgctaattggtcacccaggatccacttgccctgcccctaccccaatacacttgccacattgttgccagtggagttttcaaagatgagaatttggcaaggattatgtctgatttgtttctgaaagaaggagtacatgagtgaaattaacacgactgactaatgttagtaataaaatatttaagtacacttgctttaaaagaaaaaaaatgaatggatatcttttgcctacatatccaatcttagccaaattacttacaaagaagttaaatccaggggcctatttttaagtaactacagcacagaaaactgcactgaatagtatatatttaggcattatgcttatgatttaaaagtgttttgtgctttttattattattattatcattattgcaaatgagttgaatataatgtagatataaagtccttggttgttaaacaaaataggaagacccattatctgaaataaaatatttctagtttgcctacaaaacgttatgcctggatatgaacctttagtgtgttagtaattattagattaaaaaaagaattactcttactgctttcatattttaccagaagaattatttctaaattttcctttaatttattctgacagattcacccagcactgagtatgaaactgtctggtatattggaatccatcggaaaattaatctatctgtttggaacacacatatgaagataaacatacctaacctactacaatctatatttttaaaatatgtgaggatgattacgtgaggatgattttacacacctaatgaacaatagtatgctgggttttttgcaaagcagttaaatgaacgttgaaaatatgtttcgcctaagctcccagtaatattattttccgcttttgcctatcttttgaatgacagcaggtctcacctctttcatgaagcttcccctaccatgccatcctttatccatctcccttctgtttgaatctctgcagcacttaacattcgaatgacataatttagtacttaatgacgtacagtcttgtactatttgccgttctttcaagtagcttagtcttgtctctctaaatagattgcatgggacttaacagcagggacaatggtttaatattaattttttgtttcctctgccttctaaaccttatcctgcagcatgtttggtttggtaattttcaacctgtgagtcaaaagccaaggaatcagagagagtgctgtggggccagggaaatatcccagagctattctctgatggtctgaggacatcaggcaactgaattctccgtatccaccaaagagctgtggctggtgtgcttggtatctattgctgccccacaaattatcccaaaacttaatggttgaaaacaacagtaaacatttagtgttctcagtttctatggtttaggaattcaggggtggctcagctagctgggcagttgtggtccagggtctcatcaggtcacagggaaaatggcagcttcagtcacctaaaaatgggactgaggctggataatttgttttccaaggccactctttcacatagctggcacatcctaattgttccccgcataggcctttctacaggctgcatcatatccacagaacatgaatgacagggagagagagagagagagagactcttcttttttataatcaaatttcaaaactcacatagcatccctttctcctcattctgtttatcggaagtgtgtcactaagctcagcttatattcaacatgaggagaattagaccactttttgaagaaggggagagaaaatttaaaatttcttaatatattttaaaaccatcacagatgggtattcagtatatttatcttctctctttaccatcaacgtggtacctggaacatggagaggataaatgagtgaatggtttgtctttaatctgtgaccagtattttttttaatcaggaaaaaaaagtcttttgtcttcttttaggtctgtccatatcctctaaattctgaactgttggctcagggaatttgtaaatatccaggtcagaccccttttgatggcagtgtcaaggtaagaatgcaaaaataagactgtgcctctcttgctgtatataaggatgctgaggctcagctgccattgccagcacttatattagggttggtcttcccagtagtggcaatgattccccaggatccatgcatggttcagttcccttatgactaactatagggtgtggtatgtaaccaatggccaacacaatagatttttttcattggattttaaagctacttaaaggtggtgaccatgacttaatcatcaatgtacactaaatgtcaaatgatgtgccaggatatagaagattcctcataaatacttgtggagcaaattgaactaagttggtttacgtgttgaactcattgtcctgctttgcaacataaactcccagccagcagaaccaatttttgcacccaaaattgaacagcgtctactgaggtcctctggattcacactaatgttttatcttgtatattgtccttccttttctgtgaatgttttgtcttctttttaccacattctgaagaaatgtatatttttaaaacatttttaatttttaatttttgtgggtacatagcaggtgtatgtatttatggggtacatgagatattttgatccaggcatataatgcataataatatcatcaggttaaatgagggtatcaataacttcaagcattcagcctttttttgttttacaaacaactcagttatactcttttagttatttcaaaatgtacaatatattattttagttattttaaaatgtacaataatatattgtacaataatatattgtacattttaaaataactaatatattattgttaaatatataatatatatttaaaataactaatatattattatacaatatattattgtacatttaaaaataactaaaagttacaccctgtagtcaccctgttgtgctatcaagtactagatcttattcatttagcttacttcaaatattgaggaaaatgtagtttaaacataatttctgttcaaggtttattttaaaaaacacatatcatttctagcgtaattttgaagattcttatttttcttcattttttttttatctgtctccaaaaaaatcctttctcagaaaatgtttttccccattcggattgcaattcctggcttagtgtttagacaccattatgaatttgtattcctatcacttattttggttattcttctctggctctatatgtttccatctctgtttctcagaagcaaattgctgcctgagtgaccagaaaataaattaaagggacaaaatatttgtttctcttttgatataaagatggctatataaaaatccaccaccaacaaaaaaaaccacagagggcatttgcataggaagtaccaacgattttattgagttagaactccatttaaaaatagctcatgcttattaggtgcttagtatgtgctagacactaaattaagtgctgtgcatggattacctcatttcatcctctcaatagccctatgagatactttttatcattatactcattttacaaaggaggaaaccaagctgataagtaactttacatatgtcacaccccaagcacatagcgaagctgtgatttgaatccaggctgccccactgcagattctgtgttgttagtcactatcctaaacttcttttttaaaatttttatttggatttatgctatctctccaagtactgtacttctttatgagtctctatttaccagatattacactaagtgctttatatacttcacctcaattgtttaaccctaataacttcttagaagtcccattattgcaattttatttatttatttttttgagacggaatctcgcactgttgcccgggctggatgcagtggcgtgatcttggctcgccgcaacttctgcctcccgggttcaagcaattctcctgcctcagcctcccaagcagctgggattacaggtgcccaccaccatgcccagctaattttttgtatttttagtagagacagggtttcactatgttggtcaggctcgtctcaaactcctgacctcgtgatctgcccaccttggcgtcccagagtcctggaatgattacaggcatgaacatgcctggcctgcaattttagagatactaaaagagaggctgaagaagttgaagcaactttctcactattacataactagaagcagactccctcaagggtgtaacatcagaaggctatggtctagcaggaaactgtggatgaaactgattgctcatgaggccaagtgttttcctttttgctgagaggaagcttgtagtttactgggccctaggaagaaaacttcctacctcattatggcagtttaccatgttcagcccatcaccttccctgtgaaaggccatgggagacaggaagtttgtgaaaacagatgactggcacttcttcctaggtacgggtgattcgagagttgaattatgagagccatgaacctcggttatcacctggaccacacacaaaaaattttgggggcgagaataattagagaagtgctggtctgcaccccactacgcataaaaacacactgtctcaattacttatcttgtcattgcaatggaatatttttcataaatgaaaccaaattcagtgaatttacatcttactgagagcttaggttctacagtgagcaggtaattgaaaatcaagtataatcaaatttttcctctgctcagctctgctcttgaaccatccagtgttggaatggaccaccgtggcttcggccgagcaccagaggaagtggtatatttgcattcagaggatgcatggtgtgaaaaatacacatctttaaacccgagagtcacacttgatggaacacgatactcatagtacaaaaggcatttgaacactgattccttttgaggaaacagatgattcgtgtttccgtctcatgctctttcctgggtaaaggctcattcattctccctccctctttctctctcatccatactccctgccttccgtttccctctgtttgtaatagttgtaagtcttgaacgtgtatatgttgtgacttcactgtgttttccaagattaaaattcagcaaaatatattttatgaagacttttataatgaccttcttgaaatcttccaacactgattaccaaggagattatatacggacaatgataaacagttttatggtaatttctccagggacgacaaccaccaccacattttttaaaagttacgtagctaaaacacttagtgagtcatttaaatttaattaatcaacactttttttgagaaattttgaacctcgccagctcttgtagaatggatgtggggtggaggaatataaaattgtataaggcacaatgtaatattagacaaaagtatgagtttaaaatgttaaacctgtagtcatttcaatcaccttcctaggctcatcatttcaatgttctccacatcatgatccagctctatggtttatttataaattggcagtccagattatatgtggagagaaattatgtgtgaatcagggtgcatatttttctttcctctttaagtatttccattcatgtcccttctggcatcccccccttctagttgtagggcactgtgttagcaaacttggatttgttttccagccaagaactacatagaaaacacaaatacctttgagaatctgcttcttggaagttgaccagtacttaattctggattctatagacaggctatattaagattttatttgaagttgaagaatttactcaacaacatttacagaaagatattttcaaagctacagttgaaatcaatgtccatattttcacaatgatatagagattgtattggtactttaattgctattggaatattttgacattttaccatttgatatgtatcataagatgtgacactcactaaatggattataaactaaacatacttttctggctctgtagtgttgttactttattttttaagtgtttggctacagtcattgaaatagtgaaatgaaattttaggatttccaatgtagagaaaggataaatgtttcatgaaatcattgataatgacttaacacattcattgtttcttaacgctgtaacagacatcataaccaagtataagtaatatgcagcatccaccatcagagatttggggtggggcaattattctgaggccagaattgcctgactaagccttcttccttcctttagtatacacctttttaggtgtactttcaatagaagcaagcacgttcaatagaacacaaattaatcacagccattagtgttctttgcagagaagactgtgtggtcgctcctatgaaatgttctgtttctcaggatgagttaattcatctggaacaacattagttcatcaaggtttgtggtttatctaaagatcaaattcctgtaattttgtatgccatctgatttaatgtccagttagtttcgtggttagacagtcatgggcaggcataacacatgaatctaatatcaaaaactggaaaaaaggtgaattcttaaaggtttaattcaggcatccttagatggagattgcactgctgcttttctttctcctagggaaatgcatatctagataatgccaaatcttattaagaaaagtctaaataatataaaacattgcatgtgaatatgcccatggtaaaaatctctgctttggaaggacttttaatggaggaggataggaagaagtgggttgatcttgaaatgagattgtatatattcctttggaaggttctcaggccgtgtactcaaatacaattgtaatagtttacaggcaaaggatcgattggctagagtttactgataacctactttctttgtgatctttatagactttccaaatgctttcaatttgaataaaatgtggaagcttcattttgtctttatttatttatgactgttttgtggggacttttttttatcaagagttgagaacagtcagttgatagaaaaatatatgtatggggaatatttatgcttttctgaaacaaagtaatataaaactttatttacaaaattgttttccttaggtgttccagtggaagaggagagaggctttcacataagtttaattacctacgatgatgcctggtcgaataagccaaataggtctctttactaaaggatttcctagacttttagagttttagacttaagtgtatttagcacattggtgctcattgtgaagctccaagagggagctatctttatccattgggtgaagttagctctctgagttgacctcagagccaatttccagggaatatctgataataacttttctaataaccaattagaaaatgctggtgtgaaggatgtttcctgccatcaaacagtatacaggtagattggctgatcacagaaatatcccaaactattttaagaataatgactaattagtgaatgcttttaatattacatactgtaaaaatttcaagaaagagggcctggaaggctttgcaggagcttgatgaatggaactatcactttgcctacttgatctattgtttcatctcctgaacgctgtcagtgtcagaggtaagagaagtgaaggacctacctcagcacagttgaagggccaagagcttctattcatatttccagttgttaaccagtgctaaagatttgtgtagaggaaacaagcaggaaatgggcctagaaagacgataaatttgacatcaaattgtaaaagaggagattgcattttggattaggggctttattttctagcaaattgggatccattggagtttttgttagtgcggtttttcttctgttttttgctctttaccttttgtttttaggtaaagcaaagcattgttataactttgttattttaggaagactaatgtttggtgtaaaaatgccacaaaaactcaggcctaaaaggacaatagccttcactagaccagtgccagtgggaaaatgagcaccctgtagaaacagtttaacagaccaactgaaccaatgactatttattggggacaagggaaggagaggagtccaagatactgtccaggatttgtgcccagagaaaggagagagatggtaaagaaatggaaacatggggtaaggcaagtatggcaatattgtgctatctggagaggcagcagtggtaggaattcctttctaaatccctgaaaaagaatcatcactgcatcaactgattcctaagggggaatagtgttaagtaaccaactttgcttggatgtaaataaagtaattccccatacatttagccataattaatttattcttacaaaaagtctcaaagacagtttagtttatgatggaaagctgttattgaagatatcagtaggaacaaaacttgattccgtccttaaaaatcttacaatggtccttaggaggacaagagcattaaagacacacctgtaagtaaggaagaactggctataaaccaggagagaagcacagataatttgggttgaaggatggaaaggtcaagcctgggtggtaaaaatcagcagacataaaaaatggttggtttagaagtatagataagattttatctatgataaccaaggcaaaataaattataggctgagcaataataatgatagcaattaaaattataatagcaataccaataataatagctattttctattgactatatcctatatcctcttcatgattctaagtgatttacctacattgcctcattgaattctcaaaaaaaatggaatgaatttatactgaattgttaggcaatcggaactcactgaaaaactgtgagcaagggaataagtaacagcagatggttgagaggattaacatcaaggactttaaactggtgggagagtgaatggtggtcagaggatctggcaggagatcattgcaataattcagactagaggtaacaggcatccaaattaggcattcaaactaggtgagaatggaagtcaaggaaggacctgatccatttttttttcaacaaacatctactaaatacttgatgtcatgcattatggtagactctgggcaacaggggcaaaaaagatagacccaattcctgccctcttggtacttaaagtctgtctaccaggagacattgtagagaataaatttcctggccttggtaacaaatattgacctaaaactagtccaagatgtgtgtgtgtgtgttcctaccctcgtttttagggctctggaactcaatggtattccacctttgctgcagaatactctctcttactgactggcagagaacacagtgggtagaacagaacaaactcagctgcaagccagacagagacggacatcttcatgggtagcacagcttgagagaaaaaaaacacttttcttaaaattcttcccttccaaggtcagggtaaggattagggcaactgacactggaatggaagaaagaggaaacaaaactacttacactttgctgttccccaaagtataggccagactatcttcctcattgtgcatgtatgtaagtttactgtaacccgttacacaaacacaaatactgtgaaacttatagtattttgacctgttcccatgaactcagggcagttcacactcacgttacccaatttattttcccaacactcgtaatagtctgatattatgaaactgtcatggaaaccaactcaaaggttaagtgacttacccaaaggtacacagctaggcgtggagagaggaggaaaatcaagcttccaacaaactttccccacaagattatgagtctaaaagcactcttagatggtgtatctaaagctcgagggaagaatctgatcctggagttattgcataatgtgctaaatactatattgaaagattgaattaattaaaattaataaaataatgaaaaatgaattccttatagagttgaggttttttccaaaagcacttactacctcactaatttagtccgaagttaaaaagaatgagggatttcaccttttgagactaatgataatcgtaagcaaagttatcttttataaaataaaaagataatagtaaatttttcctagtgatataaaacaaccagttgtctgaacaaccagattgatatgttatgcattttttgtgactgtctcagtttttgtatttattttttcatcatttatttcttgaatatatcttgtaataaatacacatcaaagagttaaacatccctacttttgggaaatatttctctattgtctctattttgctaccaaagttttacagtattttattaacatttttattttatcataatattttcatttaaacttggtataaatttgttgctgtgcattaaccactcagcatcatagcttaggactgaaacacatcaaaatagtccagcaaaaaatattttaaatatggcaaccttaactggagtttaaaaaataaaactttgagtataataatttattcaccagagcggttgtttcagcaaagtacttcatcttagtttccaaagagctgctagttgttactaaatatattttaaaatagaagcaaaaaagaaatctgctctcattctggccaaatatactataaaatattaaactgttaaaatctttggcattttggagaaagatcagctaggtgattatgcttgtatagttaattaataagaaaggaagtaggtaatggttcactggggaaacttttgttatcaccatgtctatttatgaaggatcccatgctgtagggacaataacggggtgctaattctgaacgcacacagtgccgtcctacaaagacatcaagatttgtaggaaatcaaccctccagcagtcctggcaagccagactgaccccagcaaatgaaaataatcaaaagtaattagaagcgtgctggactactcctcggagagccgaataggagagtaaacatgcctgaatcctcgagccactgcaaaggcccatgtctgagctgttaggtgccctgaccttgtccacataaagatgtgatttatgaagtgcagggcacagcagcagggcttctgtcttctcctggagaaccaaattactgaggtggagattaacatgctttcagtcgggcccatttccagaccaagggaaattttttatttaaatttgttttatctttaatttcctcttttctaacagcacaccccaatagataaaaaaaataataatttaaaaaaaataaaaaaaggcagagtccaccaagagtcaccagtaatctctcttcagtgcagttgtgatatgtgtgtggggctacggacagtcacagcatttttgttggtaaatttgtattgtgctggactgtttcactggatctgtctgatcaaagcatcacagaattcacattcatgcttagagaacaaagcttgcaaaatacttattaaattaaaaaacagaaattattaaaattaaacagaatatcaccttagatttcatggctttctgatctagtttatcttgcctaaaggtcatgcttcattacaaagtttactctattaaataaaaagatttgggaaaagaaattgtgggtggtagagaatttagaggagtaggagaaagacaaattgggagaaatatttatatatgaatcagtgggaagtctcttgagtcctaaaagacatacttacattatttcttatctttgtgtcagttaggttaggtaagattttacaaaatcctattctgacatggaaaaggaagcattgattttctttttaaacacacatcaatatctatacacgaagctaatttaattagcaggcacttattgttcagccaaatgtcaatttctcagattatttcatgcttcttgacatgaactgtatgaaacaggatttaacagaatctccatgaataaaactccacttgagaaatgtaaaaatgcacatgtacgttcttgaaaagctacaaaaaaatagagttaaaacaaagatgttaggcttggagtttagtgtatatttagccacctcaagaaacccaaagctgcagaattaagggaatttagactgaggttataaagtgccttcctctataaactaaaaacataatgtcagggtgaatgggaacatactttattaactttacggtattgaaaactgccagcaagttgtcttgtttttaaatattgtcctctgcagagtgttacagtgctgtttgtccacaggaagcctattaaaagtggacagtgcagtcatttcatctggctttggctggactgcttttctttcctttaatgatgtgctggaatgtaccatgcccatagggtctccattagcagaacttttacttctgggacgaccatgaagtttaaggcttaaaagaggcatcagtttacagtcttgtgggaatcacttgaatactggagcactaacttcttactgctttaactaatatattgacttattttaaataaacagttacacaatgaaggcagagccagtggccttattggaaatctttgggctttttaaagattctgcaatccacacagctggggaaggaaggaaggggcctgaggagggtttatgcccttttcaaaccaggaagaaaacacattaacctctcccaccccagccctgccatcagccaaagggggatctttacaactcctagaaaatctatcagcccacactcaaccctcatatttttccaatgcccttttcctggtaaacaacaattaacagatcaagaaagaaaaaataatcattccttctggaaaaatgtttttaaaatctggttctctttttaaacatcactgatgaatcattccatttttttctttccccgaagctatacatttgttttagtttgttctcctactccatccccttaatatttagatcatctgtcctgatacatgtttgcaaattaaagctggtttgagattacagtaaaaccattatttttaatagcccatttcaagggcagtgctaaacactgcagaacacgcatgttactgattactgctgagcagacagcggcttttgcagattaatttgtaactgggaactactgtaaacagatttcaccagaaatcccaaggaataaagggaattggtgatggtatttggctccttgtatttatttattgttttagaaaccttctgatggaaagcaagctaacaggggaagaagcaagccccttgcaaaatccttttcctctaaccttctttcctgtttcattcacttattggggaagatggatcaggtcttctaaataattcttatttaaatagcaagaagaccctttcatgagaaacaaggccagtctaactactgtgggatttcagaaccctatctttaaactttaagttgtgtgaagaaaaagtgagatgactctgcctttacatgaagttattgttatatacctaaaggagaaagggagtgggatggggtgggggagaggggagggagagacagacagacagacagacagacagacacacacacacacacacacacacacacacacacacacacacagagagagagaaagagagattaagatttagtgttttgttagcttcctttgcccaggtccttctgatgatttcctttagtctttttcacaatttattcagtggagaacaagactgatgatgacgataatgatgatattaatataataataatgatgatgcaatgaattctccattcttctaggtacatcttccaaggtctcggagggtaagcgttcactcttggttgtatttggggaagagaagctcagacgtaggaatagccttctctcaggctgatgtctacatgcctggactgcagtgtgccttcctctcgtagctcggaaggacgcggaacggcgggcgaggcggaaggcagagctgtgttgccggcgcctggcgggcagaggcgggttcacctgggtggctggagccgccggcgctgcgctttatttcggagcgcaatgccatctaccggcgtcctgccgtacctgcaagtatccagaccttgaaagtcgctccgcctccccccacccgaagccaatataggggaaaaaactcggaggccctttccacgaaatcctaatttagccaggacctgccaatgattccagacgaccttttgttttcctaccgacgtttcctcgttttgaaagcagttttgtaaagggcaaggaggtgggggccgcagggttggggcgctgagctcccagaccccctgatcaggccgcactgtctgaagcaatcggttccccagattacttgtatttaatacacaatgcatcataaaacaaatccctcatcctgacaggaagaaaatagaacagctcatagctcgagccggtccaatttatggctaaattaaaaaaaaaaaaaaaaaaaagaaagctccgacaatgggcaagttgagggagggcaggaaatcaatggccacgaaccaggagctcttaaaggttctcaagcgcccaactctacgggaatatctgaccgggttttaggttatttacaaaggatttttcctgtcctacctaccactgctgtgcgattttctctcaaacaatggccattatctgaaataacagttcaatgtcacagataacaggccaccgaaacaaattagtcaccacctcttgtcattttctctcccccaatccctcccttttgctactatttttgtttttaaatcaatattttgggaaaatatagttctactggatttacacgtttatttgcacttggagaaaacaaaaagtgggtggcacttgtgttatcccgtttgcagctaaagtttaaccgtcagcacactttccagcccctcttgccccacctctcccccgcaagtgtccctagactcgcttactttgcttaactttccattgttgagctggggagttggattttgtccatttgtttttatgaatggagttttgtgataaaaacgcgtttacttccatttagccagtgggatttactaaatcttacaaagttggccatgaataaatctgtagacccttttgttttgctatgtatcccctgtattctttcttccaatgtcttttctacaatgtattggtttaaatgtacccaaggtatattagaaagttattaaacataggatagtaccgattactaaaagcagcatttatgatgttaaacgttcaaaaataatctgagtcgtcaaattgcttattgcacgttttggcgttcaaggtgttttaattaatgtatcaaagaaaatggcaaagactcaccagacagtcatcaatctctctaaacccataatatgctgtttgggcgggttatatgccaataatttttcagattttaaaatatctttaaagaaaaatatggtttgaaaattttgcacgcccttcctctgacctagctacaagaatgaagggaataaattagagtatgagtttcaattaaaaaaattttttttaatgcttagcagaaaactggaaatgtacatgtcaacttttcactcttgaggttgctgttttctgagaatttctaaactatttatatttagtctgaactagcgtccctataccctaagctttatcctccccactccagcactacctctcccccctacccccgccccctcctgcctcggtgcacacaccctcacacccctgaaagcacttctctacccttccccatccctcccatcccccatctctctctctctcacacacacacatgcacacacacactcgcgcgcacacacacacacacacaccacacttgtgctttcaagacatcgaaacggaggctatttccctggggaaagaaatcctgcctggcgagatctccccattggttgtttacccggagaaatctacatgtttaagggggatggtgcatccataatcagtctgtccctataggacttgggtcttggcgacctttttgtgacctctcccgccagaggaggctgctgtcactttaaaaatttaaaagaggagcccgtctggcttccgatcagatcactctgggcggcgggagatagctccctttctccctcgccccgggttctttctggatggccgagcagatcctctttaaagagacagttcatgaaatagaaacccggcggctgagcttggagttgcgaaaggggacgatcccgtgagggtccaggacccgcgaaggcgctgcggaggatctgaaagggggatagagctcccctcgcctccccaggccccccaccttttcaaactctcctcctcctgcttgttttcccccattggaactgggaaggagaagtagaagttttagtgggtttcagataactttcattacacatcgggctgataagagcaagagaaagtgagaaaagagggaggtgatgtgaaccagaaggaatagctccgagctcatttaggaagggggaaaaagccaaaacacaccaaacccgggtcacccagacgaaagaagacttcatttcttgtattaaaaatacactgttggcggacaataaatccgaaacgcgtggtcctggagagcagatcctagagacggacaaagttgtcagagacccatttggaaatcgagacgcgaggcttttaaaaaattattattattatttttaaacatctctaaatgttgctcgggatcgtttgaaaggattttcgtgcaggagcgttgggggctgctgattattttattttgtttattttgattcttctgtgaatgcctattattgctgagttgaggccatagaaatctaaaggtaagagaactcctcactttaaaaggaaaaaaagtctgggcgatgtgaaagtttgtcacttcggacagtttcctgccggggcaccgtttctacgggcgccccccgcccccagccttctttcctcctcgcccgcagtctcgcggagccctgctgcttatctacgttgctaagccgggcgatttccttgttcctcctgcgaaacggtgcggtctggacacgtctccggggtgggtcgtccggccttcggtgggtttctctgccggcttgtcggcctcttttccttgcgctcttctcctccttcccctccctccgtgtgtctctgtccgtcggtttcggggacgcacaaggtgcggttgccaaaatctgaattcctggcactggccacgcgactttggagccgctctcggccgagttccaccttgccaagtaacagctttgctgtccaacatcgtgtgctgcttcgcgagaaagtcacattcggaccctttggctagattgtggggatttttttttttttccttttgctgttggttttttgaaagggcctttctctaaagtctacctaaacggtttttttttaagctatctttggaggttgacagcttttaaaaacacaggagtgtgttatatgaaatgactgaagatgtgtcgttactttattttattcgagatttccgacacgattaagacatttgggagacaaatgcagttctgctagcaaatcaaaagtgaataattcacccagggggcaaacgtttctggagaaagctaagcttttgtcttggggcaagaatattgagaggaagaatgttaatatgatggtgaaatctttgaataatcgtataacagattagtaaaaagacattctttggaaatgaacctttttaaaaattaattttgctgttgacagtggcaatgctaataatgttaacacggaataaaattacacctacaatttttatgtgcagtgtatgtaatacttaactccctgcccctgtgaaagggtatgcttgaaagctaaggggatggatgcttcttgactttgaaattaacaagttttccacgtctctctgcaaatatgaaatggaattagtattgcatttcactggctttattctatgtcctttattaaatatttctttggtgtgtcaggagaactgccttttctttttctttttttcttttttttcttttttttgccagtcaaggaaacaaacaacaaaagatcaaccagaaaccaaacagactgaacaaaccaacaaaacccagcaacaaactccaactttttactatttaaaaatgtgcattgctattatttatgtaccttctcaacatctgggatggggggaaatctcaagttgccatttgagttactcagcactgagagttgaagaaacatcttaaagtttgtaattttattgataacaaatttttagaatttgtcctcttaatagaaaggatgtttaagtgtacacttctgtcgttgttagtgtgaagaggcatccttgaaaaagaagagtttgatttctctctgtgtgtgtgtgtgtgtgtgtgtgtgtgtgtgtgtgtgtgtgtgtgtttaataatatccctatcttatgttcgatttttcttttttaaattttgggacgacttattgcccttcaatttcctcatggccaaaggcttattcatagggcttcttgactaaagcccttggagcactgggtttttcttgaagtatatggtgagttaatgacttgaatctgcaattgggtgattgcctgaattctatgcaaaattgcttttggtctcagtactcaagagtttaattttaacttttatgtggttatgcatacagcagagatctgtaggagttatttaattcaataatttttgttctaggtatattgcttagtctttgataggaaacttcctcgtttgtattaactgattgacataacattaccatcctttgtagttattcaccatcaggtcaacaactctacagcttttaatattgatgtttaagacattattgctgttagtgaatcagaatagcttggtttaagtacacatgatcttaaaaatggaagtttccctcttcaatttttgtttagtgtgtcctaactaatgattaacatttagatgggccaaatgtaaaatttcatgaaaaataacaagatacaagtatacctaatgatggcagttcattacagtattttaatatattttttatttgttcacaaggagccagctttattttgcttactagacaaaatattgaaacatgcgttgacatgtgttaactaaaacctgagtttgccatactttgcatgagtgtttccgaattcattattttaatttgtttttctttagtttgtttggaagcacctataagacaaatcttattatctccttcaattaagagtgtgatttaattgtttcatggtaatgagatgctaaccatgaaaaaaaaatttagatggaagtttttaaattaaagtgcaaaaatgtgaaaatatatgcttacatgagactatacgaatatgaaatattgactgtaatgtttagaaatattatgttaatatacgctgttcaatattattttttgcaaaaatcacattggataaaattagcactaatttatgcatatgaaaataagcatttttgaaaccaattaatcagtttttgtaacaaattgcaagtgctttattcctttttaaaaaagcagtatgttgtcattttcaaggtaacttctcatttcccctctattaatgtgcttgtgatctgactttttttaaggatccaaagaaggaatatacatttcaatgaaatattttcaaacaactgattattttaatgagtgggccaatatggcaattgattgttctcatcttcttccctccagatcttagacgaattttacaatgtgaagttctgcatagatgccagtcaaccagatgttggaagctggctcaagtacattagattcgctggctgttatgatcagcacaaccttgttgcatgccagataaatgatcaggtatgttgtaaagattttcttgtctttccttgagagcacaaaagtatcactggagcctgaagaataaaaataacagtaagctgcagtagacccttgtggcctgtttgttgatattgtgaaagataatgcacaaatataagtaaaatgcagaacaaattcatatttagtactactttctttacattctttgggtagtctattcagtttgtactagtatccttcataaatgcaccagttttcttggtgtgactgatttaaaaactgagtattattactgcctaccgttcagtttttctttgctatcatagtaggtacattcataaaaggtattgagctaatcaagaacatcttgtgaatttatgcagaaattggaagtgatatacttgaaatgttatataggttttatttgaaatgtatatgcatagtatcagtgttatcttatctaattatgcattttatattgatttgcctaattataaatgagaacacttacttttagattaattaaaatactttttttggtatatgttaaaaagtttaaaaataaccctgctggaaactgctttgtgacattatggaggaccatgcagtgaggttgactttaataacaataactgtgaaataaagatcatgaaaatatcgtgaaacatattttacacttaataaaattaggttatgaatcttgtaatatcatatgacaatacctaaaataacaagaaattcagcccattaatttttgttttataaacattgttgagctagaatttaattatgttataatcatttatttctcttaacccaatggtttcctaaatcaaatatgtttcaaagaccatattgaagtggttgcttggcaaatctactatgaaatcaccatcaagaagaagaatagtttaaattaaatgtttccaattgaaaacttaaataaagctactgtcaattggtctaagactctatttcattcattattatgagattattctttggcatcgtaccagctaccagataatttttactgactaaacggtgtaagaggtagtaaattgtaaaattaggtttaaatggaaatcatttaaaaatcttcaacatatatcaaaaataataaaccaatcaattgttttttctccttgctataagaaaacaagaggaattattgacaagggaaaacattattaaattagctattgattgtgaacagaaaatattccgtctatcatatgagttactgtcgccatcaacaacagatattttttgagtacctactatctgtagatgtgagaaatacataggtattgtgagtgaattaatgttatactccttacaaaaggaactggaggacctcaaatgatagctttaagatgaaataatataatcatatcataataattgtttgctgttcatatttattgacaatggaagctatttccttagacagataaaactgttgtagaatccgtgaaaagatgatttaagaacgggacttgtagccaatctaagtctatttgcagccattttttcatttaatatttatgtgtgtagtgttttataataaatgtactcgtattgggaatcttgattgcaaagggaaactgttttcctgtttctcactatgaattaggctactcattagagtaggcatttataattttaccatagttgcttttgaaatatacattgtaaaatccattgttttcaaaagaaaatatgccagttttatgacttaatgaatagcgtgtttacttattttgactaaagaatcagagaaaatacttaatctgggaaaacagacaaggacaatattagacacacatttttcttaagtggtaatttttaactcttatgctgacagaaatctaagatgctaacagaatgcatatcaaataatgtaattgtgaaattcaagtaaattcatccataaacaacaagggaggaaagtcagaggtaaaagtcagatttgtatgatacgtgtagatgtatacaatcactcttagcccaattgacaagacaaaagggaagagacacccaaatagtgtatgcatatattataagcatattcacctataagcacatatgaatattctaaaatccaattaaaactagcaattctagacagctttgaaatgtgaatgttggactaggtacaatgataaaagagctgactaaagagattctctaggtctgttttttgctctcttttccatgaggaataggagctgccaaatggtgaataagcacaactcatcacataatgaacactcccattgtgggaggtattatttaatatttagctatagagagagaccctggtataggagtaattattaagcattaatgacatcaactcacctgtctaacacaaaagcaaatggaacgctctacaagaaattataaaaagtgtttctctttgctctgatttttagatacggataaagtttatcaagtgaattttagagcaagacaggtataaatcctggactctaaaaaaacggaatttgagatgaagttttcaattgcaagttagtcatggtaataattaggtcatctaacaaagaaataaaaagattacccaggacaaaacaagagtgtataaattgaactttactttttcaaagatacatatttttaaaaattctaatgttaaaagatcaagtttaatcaattcagatcagtttttaatgatatggaggagccatattaaagaaaataaatgtgcttgctaagattataatacagtttgatagtagaaggacagtcaaaatgttgtatgctggataacctgtatttgatttctttgtgggtgaagaagttctagaaacagcatggattttggtttttaagtaaagttgataaaagatgtaatctattttgtatcagaaaaaataaaaatgaaagcaacccagttaccactttccccatacctttctaccagcattttatttaaggaaattttcctgagtagtttaaattttccagtagatttctgtgagttatttcatttcagattttttttttttcagacagaatgagctttgtggcagctttctttcttgtcagtgctgcctagaaagactcaagttttgtgattttagacgtctctttcatttcatgcttccaaaattattgcagtgatgtttttggagatgcacattctgaaaacattgacatcactgctaaaccataatttctaagtagctgtggcttctgactgatatctttattcacccctgaaaaaatgtattaactacagtaatttacctctatgaaagaagctataccaaagacactagtcaattgagtcacagtcacactcaagtcataaaataatagatccattaaagatacccaagtctctttatccttaacattctaattatttttcccttaaagtttctctacaatgctacataggtctatggctgtggcacggtgtttagctggaaatttttactgagacagacaatgcttaaatatttacattctaacaacctgaaattatccttggttgctttcaggagcaagaattggccctgaaaggcagagcagggtaggagcaaaagcagagagttggttaaggaaatctctttccagactaggtcctcaagaggaccaatatagagaggaagcataaaaatgtttttttttcattattcagaggtttcatttacatacagaagcacctatgtgtttaatgtgaagtaaaccaaacatctacatgatatattgttttttttttttaaagaaaactagttatttagatattctttcctttaaagtcttgtagctgtcttacttttacaaaccattttgattggtggacataactcattgctttaggtttggtcggtctcaccctgttctcacctctctctccatcctttgataagtctccttttgaccccacatatacccttcgcctggatcagaaccagggctacctacccatagacccccatccacctcagacaaggccagttctcatgtttgaatagattcacaaagtttgggtacttatggagtagttctctggacacaacagctttactctaatacatcttcatagtgaaaacatattggtaataatcagagagtcactaagacacaatttacctaagttggctttttagatttaaatgagacctgcctttccacttacaattaatacaatttatgtaagttgactttttagacttaaatgaaatctgcctttccactgatagttagaatgatctgggcgagtactttgggataatgttttgtatatgtaagtgtgtgtgtattctgtaccataagaaggaacacactcctggcctgccctaacatggtctatgagtagaataaagttctcagaaacccaagacattattaatcttgtcatttacacaaggtgataagtcctttcatttttaagtaggcccttgacagctggtatttagtaagtagaaaaagagaagtctgctgttcactctgaataaaaagaaatgtgtcgataagagattatctaatgcctgatgtatattttgaagaaatgagttacagaagaatgagtgcccctcagagaatacaaagtcagaattcacttaaggattctgccagctcccttgtggttaatgaacggcaacaagactctacagtgttttcagttggaacaggcattgttctcatttgtgctttaccttataaagttttaactgcttccaggacgatcctagctgatgtggcaccccgcgttcgctctccttaggtccacgtgaatgattatatcagactgctgtgacactagaacagcattttattgtgagcttattatgggctcaattattattttctttggattttactatgaaaaaaaatccactttcctgcatctttcgattagtacaatttgtgcaaaacagcaaggtagattagctatgtatactgcaaaaatgtaatttgttaccctctttatactttttaaaaatgtttgtgtctactgtcaggtaatttgttaatttgctcttcctttacaagggtatctgtccacattttgtaccacttcttttgatgttaaagttattattggctttgggcattttctttgctttgcttttaagtcaagttccacttttataccaaagttatgctctgctgttttaagatgaatgccagctggcaatacccagagactggctttgtgaacagtgcctaagctgactttggggggatgttgtctggctgacaagttacttccttcacctgaagatgaaactctttcaaacatagtttgccatttgatttttacatcataaaacaaacatcacctcatcccctgccccagtgaagtttccttcatgtaacaatacctaggatgcaacactgacataacgctaggatttttgttaagattcacaaactgcataagttgaaagagagggtgacctgaagtattaagtgtacattttaagtagttagtgtttgcatgtatatatcgcctttcattcaggaagatcacaaagcatcacatacacaatagactgtaactatttctgggagggcatataaaagtcataagaatgctttacaagccatgaaggaggataatgttttggtcaaggacacaagagaagcctccagccaagtaaaacaccaaagatgatctttttagcttctttgtaatgtaatgatggaactcttcccaaaggtttggaaaccattcaaaatgaacatcagtttttatacagtcagatgaaatgaccacattaaagacaggtggctaatggatatttttggggggtctgtagatagaccctcagaggttatttaaggagacatcttgcaaggctttcaggctgggtacactgtaagcttcgtgtataataatgtgcatctttatcaattgccgtatttatgcaaactagaactaacaattctctctctgttttgtttcattcaataagttatacttggttttctcttcatgttactgacaaagagataaagatgtggagaagaaaaaaattccacaccaaagatatcttggtctcgtggagtcatatttttcatttaggaagtggatatagcaaggcagtacttgatctttttcaattaatattttcttgtctttagactgtgaccctgaagacaaatatgggatactttttctttggagaaactaagggtgatttgctttggcaatgcttagccatgataaagcttccatagtgttgaacaaatttatgttcagtcatcaatctctgctgaagacacttctctttacctcttattaattaggctcagaatgtataataggatccttcctgcagatactcctattaaaatttacatcattcctgaattggagtttcccacattactatggatagatcagggtccagactatgtttcctaatgcatatattgtatctgtagacttgatgccacctctctgcagtaccaagactgacagatatgtccatatgaaatgctgactttgttcaaacatgcaaacggctacctacctcctctcctacccaccctccaattgctgaagttccattcagcttttccttgtcttcagaaagtatattgaatgaaggtatagaaaataaagcatttaggccaaatgttgggagctggaagaggaagaaatcaactgttaacttcaaagtgaaaagacaccaatagccagaaaaggttttctctcagtacagattttgctgggagtatatttctctattatttcaattattacaacttcctgcataggttgaaggtcattcataattcacgcttctgtcatttttagacatgccaaatgcagtctattaagcataaataaaacttccagtgtttgatcaggaaaaataaacggggattcataacaataaagccttgttcatctttttaaaagtaaatgtgttttccttctttcttattttcccccttgtgtgcagaacttttctgtctcaacaatacaaacataatacttcaaatcaatccacagataaagaatctgacagattccagatttttgttctctagtataatgaacaagacccacctgattaccatttgaaaaaactaatgatagaggatttggttgaaagcagtccttcaaagtataaaacagagttagactgaaagtcttttatggcatattaactttcctatcaaagtgcttatgagtgtctatgcctgctttactgctgtcatcttggacttaaccaaataaaatgaataatgatatatgattaattctaattccaagtatatataatataaattttataaaacataatatataattacatataacttgtatgatatataataagaattaatcatgtgccatgaagcattcattcttattatatagaattatatacatgagattactaatatgaaaatttaaaaatttctccaaaacatatactttgccatgtttatgtcaaattataaaatatgtaatatatctaagcacatttatatttataaataacaccacatgaaaatgtacagtttggaagtctaaatttgctcaatcaatttcatatcaccactgtcttttatacttaacttagccttgtgagtattagctgaatggatattctctttgcatttggaattgctttcagggtttgattaaaataaattaattataataattctgtttagggcatttaatttctatatacatgtataatattataattatgccttaagctgtgggttttaccagtggtaaaactgaacaattttggatttctagttttacttttcaactacttgaatcatttagaattttaaataaacatttagaaatttcactagtgtgctatttgaacaaattttaaaaataaaagaacatgaagaaatctgttactaaaacatttactataaaaacttatccttataaattgaggtatccagagatccaaatataatattcatacttacaaaggcacaaatattgcttcatagaaaaataaaaagagtctagcaagatactgggaaaatttaattttttatgtgataaaatgaaaaaaccatctcaactggcaaaagtttcagatgtatgggagttaggttagttcataacatgttgtgcttctggattttggtattagctaccaaatagaaagttttggaggagttaacacggttttaaaatatttattatgactttttaaaaaaatggaatttccatataatctattttcttataggccccattcttcttgtctttcaccttatattgggaagaattgagttttttcttctcatagaacattctgagagagagagcaaaaataacaaatgaacaaccttttcatattaactcaaaattttctaagtgttgaatatttttgaacctctctttatttattgggggtatattcattacaaaatttcagatccaggatatttttattttgaatccagagaactttttacataaaaccctgataggagaagagacccattattaactgttttatggaacttaacagattaattgactcccttccatttttctccaacacaaaaatgagagagttatattagtagtgtctctgcttatggcacataacacagatggtatgtaattcactggactgcaatatactcaagattttgagaatacagattttaaagacattataactctattttataagcatggtcaaacatacttattatatacaaatatgtgagaaaatctatataaatcactcctttgttgcatttttatttgctgaaagatctattttataacataaaagtatattttctgaaaggcctgattcctctaagatgacatcccatcatttccccactatattgtttcagggctacaaattttcattttgttttcatttaaattactcctgtctcttctcaaatgcctgctggcataccattaatgttattagaaagtaaattaaatttatatgtagacatccctagattcaaggattcaaattatacttttgggccattgtaattagaagaggaaaacaatgttgcttaagtgtctccaaaaccctaagggatgagaggtaatgaagatcaggtggtagaaacaccttgagaaaaggactagcttggtaagggtatggcaaatggaacttcgagggacattcttattgctatatggggaagcatgcccagaatctgccctcattatatctggcgcttgccagttcttttcaaacctcagtttcatgagcaccataaaaactcacttaaaattgaaaagaacaccctgaagttaaaatccactttgcttttctttgcctttcatggcttggaatgtcaccttttacctccagtaaataaagccaacatcaacactcttccgtgtcttttattttgtatgcactcaatattcttcacatgacaatctggactcttaaagggaaattacagtagtgatctatgtcttggcaaagagaattgtctttataatatatagttacagtgtatccatcaatttcttttgtttcttagactgttcacattggattgagtaaatctaaaatggaattaaaagagacatgattaatagtggactacaaagaaataatgatatcataatactctcttaaaatgacctgacgtgtgtctaagtagtattccccaatagagacaattgcactgttttactgtcttgtagggtattgtctctttaacctcactatttccgagaagccaccgaaaagttctaatatgtcacaattcaaatgtcaacatgttgttggaaaggaagctaataagttaaacctttgagagatgccaaaaaaagaggtgattcaaactgttgagagaagtccattgttttctaaggggaaatagaactccagaatgaaacagtgtacttataagtatttaactggaaagtttaggggaaaaaagcaaactcacacattattttattattattttaaatctggtaatctttaaaaagaactgttctcagtgtacttccaaggaaaagaaaatgtgaacagctagggttaataggatacaaagtgcaaataaactattttttttatagaaacagcacataatgaggagtaattttgccaagttagtctggattctatctgtggacaaatacaaagaatcttaggttatattataacatattatagcaacattttatgtttagcattgttttctataaaccagcttcaggtggttcaactactattgaatgaaaaaaaattattttattttgacaggaaagaagctaagcagaaaatactcctcattaagttatttttcaaatttagcacaattttgtgctccggtcttgttatagaaaaataaacaattggactttagagccacctactggaataaagaggcacgtacaaagttctcatctttccaaaatataaatagataaataaaattaaagtatgagcatttctgctgatcttataagacatcaacttatgcagcttttcttagtttgaaatatcatgtgatcttgcaaaaaaccatagttaacagtaatatcttctaagaatatattcttagaatatgatggtggttgttgtgttattgttttggtagtgtatgtgtgtgtgtgtgtgtgtgtgtatgtgttttgctcagatatttagaatctggacttttttggcttaataagattgattctgggctgggtgcagtggcttacttgtaatcctaggacgttgagaggcctagatgggcagattgcttgagcccaggagttcgagaccagccagagtaacacagtgaaatcccatctctaccaaaaaatacaaaaattagctgggtgtggtgttgcatgctgtagtcccagctactcaggtggctgaggtagtaggatcaccagagcccagggaggttgaggctgctgtgagctgtgatcatgccactgtaccccagcctgggcaacagattgagaccctgtctcaaaaaaaaaaaaaaagaaaagaaaaaagagattgattctgtttgtggacattcttaggaagattgggagaaaagacttattggcactgttaaagagagagaagaatatatgaggcaaaggaataatttccttctcagagtactctagggttttgcaaagatactgtggtataatataattggtctcattttcaccagttaatcgtagaacttcattctttcttctaaaacctctatctgattatgggattgtttaataaataaccttagaatgaaaaaaaactgatgacatttttatggtagaatgaataaacatctaaagattttcatgcttaaaagcttttttaaatgaacaaaaaccaaaaaacaaaaaacctggtccctggacaggtaagttggacaatgacttgcctaagtcaccaagctgctcaggagaaaggcagtggctcttggaaatttcaggtcagggttctttccacacttgctccactgcttttgagtcagtcattaacagatttattaaatgcttcctctcctcagcactttgctagaaagcaaggggaataagcaccacccccaccaccccaataaatgaatcaataaaatgcataatgcctactttcaaagagagaggatcaggagctgggcctgagggcaggaccctggtatgggagcacccttctgattggtgagagaggggttaagttttgaaaaacaaaatactctcctttgttgtcatgatcctttatgtcatgtcctttcaacctattaccttccaaacacgttgttgagaaggcgctacttttgcaaacttgcttaagtggggaaggtacaaggtaagctaggctactgctggagaattccaggcaggattcaactctgtgagtacgtgtggtttgctagggtgctttgaggattcagagaagggaaagttcttcgttaaacattacacaggatatatgtgacgcagctagccttgcattaagaaaatttgatttgtgaagtaggatttggaaaagatttgtgaactggcttgagagtcacagctttccatttgtcaccagagggctggttttcaatatataaaacaggaaatcacacttcttttgataaaaaagaaaaagaaaaagatgtttgttaaggtgtttgtacaggtatcttagtgtatatcttgccctttgttaatatatatacatctctctctttcctgattccatccacctttattttgtctttaaagatattctatagagtagttgcagacattgcgccgggagaggagcttctgctgttcatgaagagcgaagactatccccatgaaactatggcgccggatatccacggttagtaccactcacgccaccctccttatcaccttatcatcgcgactataaagtagcatcgaaagcatccattgttcctggtgtttgttagtttccctggcttttcaatgtcagtttcaacaagttccttctcttgaagcagctattttcttggtttgacatctggccactattacagtgaagctgaagtaagcagaggtcttccttaaagtggaggtcaaaggaattttgagcatttgcgcagaacctcacctagttaaaccttttgtcaatgcattagtttatggtgagaatcctttcactgtgtaacggatctttcagggagcttgattttgagctttcctaaatcaaggggatgtttctgtcatctaatgttctattactgggaaaagtgtttctactgcaggaaaatcttagccaatatgaccatatgggaggggtgtcagggaagaggccttgggaaaaatgtatagatgaagaaattatagaggcagaggactttttatttgccagaggcctattctaaatcaaaagataataaaaaataatgataatcagtagtgatacatgtttaggtcagataaagagaaaattttgcttatattgatttgtgtcattgagatggaaatttaatatatatttttctttttcctctttctgtgtccaagtatactgtgatttggttcaacataatctagtggcatctttagaatattttgtagttggaaggtctattgggaaggattacccattccaacccatcacagagtcagggatcaccacccttcatctctttagcatcccagatgggaaaatctcagcttttgcttttatatctccaggaagctgccactcttggcgggttctctttacttgaacaatttttcctttggactgcattctgcctctttgtaggttatacaagagtagttgtatttgcagggggagggggagggctggcggcgggggcggggggcgcttttggtactcattttcctcttagcaactctgacatgcaaatagctttagaaacctagagttcccaattagcctggtagagtttgagcctgaagagggtgtctggcccaatgggaaagggctcttcggcagcaaggagttcttagatgatgaagaactgcaatctgggctttctctggtgcaatgaatatttcatctgtaaatgttagacctaaaaaggttttcaaacaattatttttatttaatattaatgattaggttaatactccaaaagttttaaatagaagtgactgttcttttagggctgccattcataaattactttcctttacaacactcttgaacccatcagttgcttcttgttttcaacatatcatgtttacatccatacatacactacatatgttacatataattcttataatatttaaatgatgatttgtattttatacttctaggattcaactcttcctaggaaagaaaatgaaacacatgtattgcacacctactatatgatagatattatatactctctctatattgtctcatttactcttttatgcatagaacctgtgggaaagaaattatatccattttacatatagggaaactgaacctaattaaggctaagtaaattgtccaagaatgcatggctagtaagtggtgaggtcagcattcaacccaaaatctttgctgtctctgatacctaggctttttccatgcatgatgtggcctagagattctgcttgtgttcggactcctggctgaggtcctaaatatagatcttaaacaaatgaatagtattacagactataggaaatgtttctcctaaccagctaatgtcattgagaatcctgtctttagagccaagttgatttttttagaacacttccctctctcgaccctctaaatccaaagatttctgttaccactgttactggtttagtataaactaaaccagcatcttatgtggatttctgcagcagtgtctcacttggtctctctgcttgacttctcatactgaaactgggaaaattcttctaaaaaccaagtctgaatatatccctgctttcccactttcaatggctgttttccttcttagcatagacttataaagcccctggtgagctgcaccccctccagcttcattttccactcctcccttacatgtgctctgtgaacctaccatactttactacagctctacctttctgtggatgtgccatgttcttttttgcctctgtctcttcccatttcccgaaatgtgccccctccttccacttcacctggctgattcttactcattacagagccttttctgaacctcttttcagaaaaagaatacttgactaaaagaattcttggactaaagtattccccccaaaacattcagtcaatgaacaattgaagagtaacatcttccttggccataggtctataaaagagggattatgtgtcatattgtttgccgtgggtattttttagcagtgtgagctgttttcaagacttctgtgattgtatctgtgtgatctgtgcggagtgtggctttatgagtgggctgaaagctattcaaaagacaaaaatagaaacaatgccatcactacctgacattttataaccttgttatctctataccacactactaccatttatttatcttattgatttaaagtgcaaattaatgatatgttttctatttaacaaagctatgacaattagcactgaccctggggtaacataaattagcctagaagggtactaaaaacatcctgtgtcccattattagtgatgatgaatgttaaactatttccaagtttgctgacattaaccaggttaaacatggctcagatagggactctgtgtcccatgttctttccagataatatggcactggcataataagaagtgtatggaatagaaatggtttcaaaaccttatacagccacatagctctatactccctgactgtttacatttgacttctgtgaacctgaaattctcatctgaaaaccaggataaaaatctgacttacaattcctcataatcaggttttaaggaatgtcagtaatccacatacagggttgagaaaatatatgatgctcagtaagtcgtatttattatttttagtattctctggacctgaaaaggtttagtcaaaaagttttactgatcaggaggaatatactctagtcacagccattgcttatgttattgttccagtctctgtccttggttctttacatatgatatttctaatccagattaaaattgacaagatagaaatgacaatcaaataatacctattatgtcttgtaaaatttggtaagattggctggtttgtgatggcaattcctgaccacccaatcctaacacctgaattgttttcacagaagaacggcaatatcgctgcgaagactgtgaccagctctttgaatctaaggctgaactagcagatcaccaaaagtttccatgcagtactcctcactcagcattttcaatggttgaagaggactttcagcaaaaactcgaaagcgagaatgatctccaagagatacacacgatccaggagtgtaaggaatgtgaccaagtttttcctgatttgcaaaggttagaaatggcatgttgtaccatacaacttgtgtattttttctgcaatgttatgctgaattttgaggctttgtgcagatggaaaatttggaactccagtgagctggacaaatgcactcgtgacatgttcagaaatcatatttgcctggatattctcatctgtaaaacatttacagtgaaattggaattagttattttgatgtcagatgaaaaataatgttatattattattaagtagtgttattaaaaactgaaggcttaactttatagtaaattgtgatttagagaaaatatagtgctggaacaaattaaagtaatcatatgtcaagaaacaataaagctacccctaggaacattcagatgattttttaaaggactagatctggtattcacttaatgacaggtaaatgatcttttgatagagcagtaattcatggatttaatttcaacaattgatctaaattacatatatataaaagaataagagaagcatgtttgatttcccaaagtgttgaatttcctaaaaggaaaaagagaaacacaataacgtaaatgaagtaattctttaacacttatttttaacacaataaaaattatatttcagtgacatattaactttttatagccttttgaattttattctataactttttaaaattgctgataacaacactagaacctactttttgaaaagtatatactaattgtactacagaatggtctttaagattagaacagtttagaacagttaatgggtttttttgtttgtttctacctaatgatttttgccttggtccacaaataattttaataattgtattcactattttgcttttaaatctggaaattatccttgaaacttgtaatcagaattttaaatgaacatcacattatatttaaatgggaatggtagtatatcaaatggccttactcaagaatgggaattactcagattttgtctttgacagtccaacttcagtttacccttttgtttcctttccttctttcctggatccttttcttcctctcattttcacctcatgtttagccctatatcctcttctcctggttacgcctcttttaggaaaggatttcatctagtagttcattttaaggcataaatgactaaaaggcattaagcataatcctttctgttgagaagactgaatagaaaggataagtatctagctttgaaaatttaggactaatttagctattagagagtaaacattttaccgaacaagagggctttcccagaactttttaaactcacctctgccacttcatataaatcttcatagagaataaatcaattatgtatgtttagtaaagtgtggatttgtaataaaaaagccacagcatgtccctttaatataattgtgcccaaatttaaaaaaaatgaagctaacaaatacaaatgagtaggaaaaaatatttaaactgtaaagtaatatctctggtgtcagaaataaagtccatttccttcagttgtgttataaaaaataatgaacggcattataaagcaaaaattgaccaactaaacactaaaatgtaattcttactttctactaagagtgtacagcaatacttcttgggtggagaaagcctcttaatctgcctagctgtaagattaagcctgagtcaactctatctaatgctgaaaccaactgttagtttagttgattcagtcaaacatttagtagaaaacaataaggaaatctaattatctgtcattgcatgaattctcaacatttatattttggtagtccagccatatggataaagcatgtcactatgcaattgaatgctaatcctccaactggtatttttggttataaattatatgatctagccacattcagaacctttattttctgaatattttttcctttattgaatgctatgttgtcactttatgctttaaatgacaaaaattactttctggatttgatctgttcttctgctgtctatcctttatgtaaaatcttgagaaaagaatgcaaacaaaaaaataggagcaagaaagaaacaaaggtcaatgtgcaaaaggtgaaaagaactgaaaagaactcaaaagtctgatcaaggctctatagattgagataaaattccacgaaaagcagagaagtctcactgactgactgcattgcttctatgtttatgaaagcaatgcacatttacttttgtgaaaatgacttgcttttttgtgctttttattactgattagctggaagctaataatactatggaacaatatggagtttctgcccgattagaaacaaagaagggaaaattccttttgctttgttatctttttacacctacatgttcataatatactcttaaaattaaaccatatccttggaattagggggaggaataaaactcaacatataggccaagcttttgccactagatttcagggtttatgatttgatatatagcatagtagaatatatatcataaaatggcttgcctgtatgggttgctagggacggacagtgagaattgcaatctgtacagtgattttggaggatgtccctgactcatttcaatgttaacgacagttgttggtatctctgtcttaactcttttattaacattccactctgtaacaaacagaggattacatatcgtagataaagttagggcctttcttatgactccacacacctgtactctcctagtaccttttgttcacagaggtatcaccacctgtgctcagaatagcatttccaactcaattgattcatggggcaggaaaaatgagttcttgtgccagtacgaatagagttgtggggaggaagctgagaaagagaaaattaggaaatgcatttctaatttatcaagatatgagaatgggcacttcattttcttacatatactcccagtcacacagtctgtatgaccactggataatttattctaggtgcacaaaggtcttaattggtactgatatttatagcattcatcacacaaagaaataaaagaaaataaaagaatgctttcatggttggtactttttcttttctaaataagttttttattgtggagcgcttcaaatatacacaaaactagagagcggataggatttttaaaatcccatatgttcagctttaataattatcacatgaagccaatcttgtcattatacctgctttgaattatttgaaacaaattctggacagtatatcatcttattcaaaaatagttcagtatgtgtctatagaaagtaaggactccttaaaaacataagttcaataccacattaaaaataatttcttaatattatcaaatattcagtaagagcacaaatttcctcagttataaagtttactgttttgtttgaataaagatcaaaataaagtccacatatagcaattgattgacaagtctgttatgactatttgaatctaaaggctcccccagagggcagtctctttctctctgtgtctctctctgtctctttctgtctctgtctgtctctctctccaccaccttctttctcttattacaatttatttatagaaaattatagaagaaactgagttggattctgctgtttatatcattgtggtgttaacatctttctctatcccctctaatttcctatagacttgtagttacatcccaagcctttgctgggatttacgctcagtgtttcaccaagaagatttcattgatggtgccatttatttctacccgaagtcacataatggattgcctagattcattaattctttaggagcttcaaaacgaatgtactctaactctatcattgtttcatcatttattacctggattaatttcgcgtagagaaccttcccttcatagcctatttgtttaccccaaagtgcagtttacataggaaaagcagatatgtgcacaaatattttccctttatttaccagttttaggaataatgatttggctttcctgcatcttccttgggagaccattggggttctgtttgtgttttgaatatctttattgataaaagagttgctgttcttattgatgcttcacttgccccacctttggtcagtgggcatctcttcaagttggaaccctaattttttggatattatctataaattgcttgccttttgtcataacaagatgttcaagggccatcttgtgaatttcatagttcagatttgaaataagctattttaccacggagctctggttactttatttgggggtagtatcccagtgtgttatgtatttaatcaataaaggtgttgcagacatcttctatcacataatccattatctataatatttgcttttcattatattcatgcagatttcatatacaaattttagaaaatgggggcaaacatttgagaagataaaacaatttaaactttaaaacagagaaactatgcttgtgagaaacttctaatcatgtttttcttttaggggacttaaatgttgcatccacttaaaatattacacacttttttgctccccaattcttaggttttatatattatgtaatatatatatatgatacacacacacacacacacacacatccatgcatatatccatgcatcagtccatccatccatccatctgtccatcctagattcactagagattatatacattagacagaatacttttaagcattttctgtttgagtgtttgtgtttcagttaagtgagtattaagctcacaagtgagcttaatactcacttaattgactactcacttaattgtgagcttaatactcacttaattgtgtttcaattaagtgagtattagcaatacgtgttgttgttagaattgtgtagtgaatccaaaactggacaaatagcttgttgtttatcatgcttttaaattggcagataatccctgccagctgtatcagatttattttctaacaacaagaacacatcttcatattggtgacacagtccaggagacacagtccaggaaatataaaatgcacttttgtctgtcacaagcctgtttctgctcttccctccttctcagttcaactccttttccttcttgtttctttaattaccagttggattaacaataaaatgttgttccgtttatgaatgcatcctttgtcttttaaaatctattgttctcttaacagcctggagaaacacatgctgtcacatactgaagagagggaatacaagtgtgatcagtgtcccaaggcatttaactggaagtccaatttaattcgccaccagatgtcacatgacagtggaaagcactatgaatgtgaaaactgtgccaaggtacagtgaatttgtaggctacttggcctctctatgtcatcctgctctctcttaatccatcacttgctacgatatataaaaacaagccttcagaggggaaactataaatatcttgagaaaagtacactgagtgttgtatgctaaaaggcattagtagagtgtataaaaacacttagtgggtatccttttatttttgtaagggaggaagtgaggcttaatggtgagttccagaactaggtgtcagacatccttggtaaattcctggttccgctactgatttgccagtgtggagttgttttatggccttgcggagaatgaaaattttatccaattcatgttactgatttcttttaatagcaatttgtgaggaagtcacataaaatttctgaatgcctattcagaaagaatgggtgactcttatatttgcagatttttccaaccaagggctcaccataaattatgacttggttctaattaaaatgtatagagcctctgtcagtgctgaacaacatagggatgatatggaagtactcaacttagaccataactgtgaactatggtaaaagtaattcacttcttttaatttcatgtttcttgattaactcaaagatgtcctggtgtcattaaagttgctttctatttccaaaacacatttcctagcattttaatagctttttttttttcatgccaatggaaatttctgtaccccaccaggttactgggtagtcattctcctgtgattaccttgttctatgcacattaaaattttgtatgtttttttctcataaaaattaaaaaatacatttgaaatttctttagggatgttttgctctcagatgtgttgggtggcttttttatttttgtttttagtacaatgtctaaaggaatggttttagcttgctagtaactcactgaaagagtgttagaattttacgccctagggaaactctttaaatagatttaatgtagttagtcaaaatcctccaaatttttgtacacaatgtgtctttatttaaagggtgaaaatagcacaccagttttaataatggcttaaccagcattttattattcaactcaagtcactctaaatggtatcaaaaaggccttgaatatggcctaatagtgccattcattatttggttcaactgataccagtggatacaccatgctaaggatatagagcagaataatttacagttcctaccctagaggagagtacattttggaaattagaggagagtacacttttggtctttggggaaaagaaaaacaaaacaaataagaaaaatttcttcttgagtcatcccgggtcttctttattgtgcccttgagttaagtttcttgattaatcagtactcatttcctagcaggttttcacggaccctagcaaccttcagcggcacattcgctctcagcatgtcggtgcccgggcccatgcatgcccggagtgtggcaaaacgtttgccacttcgtcgggcctcaaacaacacaagcacatccacagcagtgtgaagccctttatctgtaagttttcaacactccagccctccttcccacatctgtctcttccccaaaaggcactgtgaccaggagagtggctgcacatggcctttagagggtcaccgtgttagctatttatggtccaatccagtagggctatttatgattacaagtaaatcttttataatcagatccatggtattttgtccttgattcctggggtgttttctttcagaagaaatcaataacaggtagagaaaagaaaattcattagataatcaaagggaaacctccacaggttgtaggatttaatcaggacaatcagatttgtctcatattgtaaatgttcatggctttgtaaagcagcaaatagcagccatcactaaacaagatgaagtgattaaaaacctgttctggatcagaaagagctggaagaagcccacctgggaagtaggcttacggctctgtgtgcatgtatgtgagtatatgtgtgtggagagagcgagggggatgaaatgctttttaatctacccattgttgccgatcacaggctgtcggatctgtagttctctgttacttgaagaaaagcagaacattttcacttagatgctggacatgctgtttctcttacccactgcaccaaagcaagtttataggcagtgtgcttttaggggacatctgatctgaccacctacttagaacatccctgtacagagcactgtagtaacatccttcaaatacaataaaactcagctctcatttgctttttcttctctccgcccactcctattctctgtattgtgctcaaacattttataagtaaaatcagttgttcttagtctacctgggcaaaaaatctgggcttcttttaatccattgcttggcggggcatataaatacaatgacttattgagttgtgctacaaacgtcaagactgattttggacccagatacacatagaattggttgaagcatactcagcacttggcaagacctctgactttggtttgtagtaggtatatgagacactactacaggacctgatggaaaaaactatttttcagtgccaacatggagatgccagagactaactctcctttgcctcgacacagctttcttttgtgtgtccaagcaccaaaatagcttttctttccttttccagcttacactagagtcctgttttgctcatatgctcttctgttccccgggtgaagaggactagcagattaaaaaagggtgctctcatctcccttggggaagctctattgaaggtcacgggaaataaagcattcaatagaaattttagacttcttgtcgcaaaaaggcattcctgactcttaagtcttaatgccctgaaaatgtacttggaagtactacaggcatacgatattaaatagttcatttatttctgattcctcagaaataaattttggtaagttttattatgttttgatgtgagaaaaaactagaataaaccacaaggaattctgatcactcatttaatgctttctctattatttaaaataaaagtcagaaaatatagacttctgctatcgaagattctgggatctggaattttaattgtgttgaagacaagtgtttcactttaaagtgccatagggtgtccctttccaatcagattgcataaagtatttcccttgaatgtattttcagtaattattggtaaatttaaatagcagatggcattcttcaaatttaaaatctgccagagaaccatggagtaattatgaataatagccatgtaatttcagaacaaaagagattaaagatcaggaaatggtgtggagacttgagtggaggaggttcacctagggctgatatctgtttctcaccagaaggccacacaccacgatttacccccactggtgtgtttatggcaactgtctcttattacagtgtgctgccacgcttgagcccaaagtcaccagtgctaaggtaattactcactgcctttacagaaacctacagctttcccaaatagaaaccacatgctctaataggctgaatatattcaaaatgcctcttaatttgtttaataagtagaaaaatgcaatgttaactgctggctaattccttattactgagaaaattacagtagagtataaacttcaacatcaattgaaccagtttacctggaggcctggtagtttgtggtatgccaggccaggccttcaagtgccgaaaacaaagcctctgcctaagaaaacatcccagattcgatgttcttgagcccagacacagacagcactcagccatgtaacaacgggtgccaccagaaaagtcagctgaacttctgttactccaatagagagaagctcttgattttttttttttaagccatctgattgtaagaaagaagtgtagagagcaacatttccttgccaaaaaatgacaagtctttgaaaaacttatgtcttggttgaatactcatcaagacattttttcaatgccttttaagaggtgttgctttcttactttttataattccaataataaaatattgttattgcttgtagctataaattattctaatatatctagtaaacatctgatgtttctaccttctccattatttgattttaattagtgtatcaaacagtttaaattagatgtatatttatggtgtatggttaaattgtatatacttttaaagctgactctggtcgatatattctggtaaaataatttgaaaagatatcacccacatcttctattcccattaaaatgcatgttacagcctctgtaacgttgtgattcatcccacaattgaaggcacctttaatattaccaaacactttgatatatgcaacaatacactttaacctttagtagtaaaagaaagagatatacccttacttggtacttcctgtttggatgtatgtgggataatccaagctctgggtgagttttgcttgactgaaagtctataaaatctccttgacatgagtttttttttttaattattattgctttgacttagaagcacaatcattctgcacttaaaggcagccatcatatgaaagcaataactgttgcattttgtcttcaatttaatttcttaaaataaatttgcttcaacaattaccaacaaggtacatcttgtttctgcatgtattgaacatgcacagaagtgttaaaataagctcacacataacgtggctcaatcccgtaaagtaaaataaaaaatgtgatgctcagggtactgatactgtaatactgctggacagtgaagtgagtgattcttacctggtaaaggagttattaagggttacaaagtttggtcttaaaatatacttggctatagtggcacatgtgtgaggaggaagattctactttattgacaaattcttagcaaagaggcatatttcacagctgcatccaatgctgtgcccttctttctggattagagctttcacagtgctctcccctactgagcatagttggctataacacacagaagtcaagcctgagataaccagtgtagatatgacaacaagtggacatgtttcccaaggacggggttttcataaatgcaggaaggttagcacaaccactggtgtgaggggaagtcagaggacgtgatcatagttcatgggaaccagcaatgcaggatgggctacattcaatttagtttcctttgcaggcttaaaatagagccattgtaaattatgtcagtctttctcaaatcatgaaaatgattgttaaaaaaagtctcagaatacacaatgtgcattgttgtgtggctttgatgtgtgaatgatgagagcatatgatataataccaattaaataatagcagggcagtcacaggctttttccccaaggggagaggcaataaaggtgaagtttctggttgaggatattttattttgttttggtgcctacaaaatagaatttttaagtactctaaaatttgaaaggggttcttgttgtgttttgtacgtaatgcattttaagactaattttcaacattatattagtataataattgtgtggagaatcaatgcatgatggaatttaacttttcataaatatttaaatacacaaatattatgcaaaatattgcacaagggggtgacaagatatatatatctatatatatgaaatatttgtgctgcctcaagacatttgtcaggttggttgccttgctttggaatctagtgaaatggggttttctgtgtttggagcacccagattggtgcctccaatgtcttttactggcttcctaattgaaattttgagtaaaccaattgtgatatttgctaaattcagaagcaattgacataaagcctgagattcttttttgttgtttgcacacaggtgaggtctgccataaatcctatactcagttttcaaacctttgccgtcataagcgcatgcatgctgattgcagaacccaaatcaagtgcaaagactgtggacaaatgttcagcactacgtcttccttaaataaacacaggaggttttgtgagggcaagaaccattttgcggcaggtggattttttggccaaggcatttcacttcctggaaccccagctatggataaaacgtccatggttaatatgagtcatgccaacccgggccttgctgactattttggcgccaataggcatcctgctggtcttacctttccaacagctcctggattttcttttagcttccctggtctgtttccttccggcttgtaccacaggcctcctttgatacctgctagttctcctgttaaaggactatcaagtactgaacagacaaacaaaagtcaaagtcccctcatgacacatcctcagatactgccagctacacaggatattttgaaggcactatctaaacacccatctgtaggggacaataagccagtggagctccagcccgagaggtcctctgaagagaggccctttgagaaaatcagtgaccagtcagagagtagtgaccttgatgatgtcagtacaccaagtggcagtgacctggaaacaacctcgggctctgatctggaaagtgacattgaaagtgataaagagaaatttaaagaaaatggtaaaatgttcaaagacaaagtaagccctcttcagaatctggcttcaataaataataagaaagaatacagcaatcattccattttctcaccatctttagaggagcagactgcggtgtcaggagctgtgaatgattctataaaggctattgcttctattgctgaaaaatactttggttcaacaggactggtggggctgcaagacaaaaaagttggagctttaccttacccttccatgtttcccctcccattttttccagcattctctcaatcaatgtacccatttcctgatagagacttgagatcgttacctttgaaaatggaaccccaatcaccaggtgaagtaaagaaactgcagaagggcagctctgagtccccctttgatctcaccactaagcgaaaggatgagaagcccttgactccagtcccctccaagcctccagtgacacctgccacaagccaagaccagcccctggatctaagtatgggcagtaggagtagagccagtgggacaaagctgactgagcctcgaaaaaaccacgtgtttgggggaaaaaaaggaagcaacgtcgaatcaagacctgcttcagatggttccttgcagcatgcaagacccactcctttctttatggaccctatttacaggtaagcgtgtatggaagatgacgaaatatgagcagatgtatgaaaggcggtatttccactgtaaagtgatggctttttaacacatcatttttactattattataaaacagagtgaagttgtttgatctagtgaactcattttttattctgaaagttggatcattctgtttgaacttatttttggatgtttctgaagttgggggtttggaataggcctacagaatttttttcccttgacaataaatttatttttaaacactttttttggagtggaaaatatgggaaagtcatatttaaagtaaattgtcaagtggcggaagaatgaggatcctgaaggattaatgcaaatatgcgtgggtacttaaatgggtcaggttctttggaatgggggggatatctaacagcaagagtccactcttttttgacctaccaacacatccttaataagggctggtcatattgtttctaaataaatctctcaggagcccccaagtaaatgaaatattaatcacagaatatgttttgtatataatatgagtagttggcttaaaaaatgtctctgtttaatagcttcattatccggtttcctttgatgtagcaaaaaaatcttggggtgaaacatacaagtttaataaaaggcctttttggcaatattcagtaatattcacctgaccaaagtgatttagttttaaaatactagttttctttaaatgggtatgaataataatatgtttgttacatattttgaatattacaaacattttcacatttactttctcattctaatcttgaacattgtcaagagttcatggaacatctggataattttttattgaacttatttaacatcggagtattttcatattttgcctaattctctttcgtgaagagaaaatgtgctattatttaattcaacaatatttatcaagttcatattacttaataggtactagagctgcaagttcttctcacttacaattcttcttctatgtatattatctataatgcgttaacaaggaaacactgtcagtatggaaaggactaccctcgtttgaatatgataaagtagtatcaaaggacaatacaaaataactcagtgctgtcagtaccaagtttggctgctttttaaaattattatatctcaattagtttggcagtcctgttaccagagaaggaaaaaaaagaaaaacatgtcttccgtgttttgtgtgtagattgtatgtcacacatttcgggtaaagtcgtatttccaactcaatgatgtgtctcagtcctttgttaagataatttttcaggctttcctttttgtaccctctcagtagcaactggcttctgattcttccacatatctcttgcactcatcctcatcacctactagcattcctcttactcactgtgatctccaacatctctctggtgcttgtctcaattaagacctaggcctgtcattttgccaaactcatgaaagacctagaatccagttttagtgtcagacttgggttgcaacctcagccttctcatgtctgagacttaaaaaaaaagcataaaatggatataacatcacctacttcaaaaagtgaaatagtatatgcaacacacatatatcacatatataatatcaataagtggtaggtattttattctgctttaagagtgcacatatctaaaagtttttttaattaccaagttggtaaaagaaattaattcaatgaattaattcaacatagggatattatttccctatgtgcttaatacaaaatagaatggcaaacatttctaaagcagaagggatatataggtaagttttatgtgtctctctctatcttcagaaagctccccattctcttctcaccacacccattctatctgcctgccttctttatcagcagtggcatccaaagagcatatattctctctctctctctgaatatatattaaatataatttacataaaatatttatatatcaatatattatgctatatgtttaaatataaatatatattgagagagagagaacctcaaagagtggctagcagtgtatatgcttggaaatgcccttactattattgacaaatatggaaggaataaagtgcacatttgggagaacaccttcttggtagaaaattgctctaatattcaaaatcagccttgacctcatgatttcaaaatcattaagcattcttgtctacatttggaatggaaaggtactgaattcatgacaaatgcctctaatttagtgactccttatttttcatgttttctcgttattcctattcctagtcattcagtagggtttttccattataaataggaacttttcttcttaagcacctagaagtgtcatgaggaatctccaagaactggacagatgtctctatagttttatgagtgcgcttcccagaaacctaccattgactttattgttagttcctttaaatgtcagtgattatgtagtgattgatatgtgagactgcttcatctccaaaatctaattttaacctttcagagtagagaaaagaaaactaactgacccacttgaagctttaaaagagaaatacttgaggccttctccaggattcttgtttcacccacaagtaagtattttggatttgagatttccagcttgtaaactaacttgttgatcctgaaaagcaggtgcaatgaaatgaaagacatcttgagaacattaggatttcctatgacgctggtgtggaagaacacaggaaattctagcagaattaaaacccaaactctttaaagaaaaattagttaatatatgtgtaaaaataacatgatttcagtgttaaatgattgtctgctattaactgtttattgagttaaagtgcattttggagtgagcaggattcagttaagaaaataaatatccaagatgtgttttgtgtgtggtggttgctgatactaagaaatagatcatactgtgactcgtcccatactcatgaaggtcattcttgttcttttcgggcttagataaaaacaggaaatgagtctacctgacaagttgttaccatagagggtgaaggaatttatctagagaccactgagcattccagcaaagctctgtaattgcacaagaattcaccacaatgcacagtgctatttgcagaatagaattgtgttcatttatcaaaatatatacagtttatcattgcaaggaaaatgcaaagcagcactatctctaattggttcatcctaaagtccttatacatttagtaattttaaaaaacaggtttacatattttccaccatgtggaaaatcgtattgaaagaacaaatacggtatataaacatcttgaatgtggtttcttaatttaaaatttattttacttttgtttaaaggatgcaagctctggtctttatagatagcaacattttaataaaaattcttaaaaatagaataaactaatttgttctgttgtaatatgttcaaacaaaaaatgatggttctctaataaaatcaggggaagtttatgcaagctgtcttatggaaagctatgaggtaattaaattaattaaataaagatcatgggatatggttcttttttccttttcctttctgttacctcttttgtattttttcaagtatctttctagagtcctgaataaagagtatgagagttgtaacacaatcttctgggttagttggataaatctactattactaaagaactctcactccctttcaaaatgagataatatgtggtttagcagtaaaagtttcagaaacattccagttagtattaattttatataggaagattaaagaatgttactcacataattactttatggaaaagaagtaagttacaaaacagttaatgtttatcgggactatattttatatttagactgatctaaatagtacttgtaaagtttcataggctaataaactggaatgtagcacatattttgtgtcagatattgtacaaaaagtacatctctcttgatacttcctttataattataaataaatacttatgaacatataatattcatgtatacattaatgttacaaaaattaattacagtaatattaattacagtagtcaagtgattttcatgttctgataatctttacaatttagtaattaaccatttcaaaattgagtgctatgggttcacggtagaatggagaaaaaccaaaaagggattcagtgtctttgaacatcttagtctacctggctcttagttttcctgtttgaaaaatgagagagtcgggtgtaaggtttctatccactttgaaattcaaagatgttttgctaactaaggtaaatttaccagttcataagatgggcagttttgtcaaccattcattctgtatgaattcgcagctgttagcaatgtagtaggtatatattttaaaataaaatcataagagagcaaatatgttatattttaacattcccaaagttaattaaggatcacaaaagatgaggcatgtgtccagtgcttcgagcatagcagtcattcctcagatcttcacaaacacgcctgtgggagcacagtggcagtgattccctcctacaccagaatgtcacgtcttggtgtaagggattccctattgctgcatgttgctattagaacaggacccaagagtggtgatcaaaatacttagaacctgatgcgtcatgaatacctaccaatcggaatggatttctgccattctggagcaggatactggaggcttttgctgcatcaactgccaatgttttatttgctggatagtgggactatctgaggggtgtttggggaagaggccaaggaagcaggggaacactcagggtgcttagggcaaaggctatttaccgactattacagaaatatttcattgtttttataaatatcatggctgttttcttgtgtcatgctatatatagctgggatacaagctgggatacaggtgagccctcttcctctttcatcaagtcttacccttcccagggtagctggaagagctggcatttatgtacgcaacatatttagcattgtgcttggcatgtggaaggacctaaatgaggaagagctcttattagtgggtgcaaaagcattttattataaatataaatatttatgcccaatttctttgccagggccatgccatgtatctaggagtgcttgaaaagatgcttattgtattcttggcatgacctcactgcagaagtaaggggggcacagatcaaggagccaaaacagaatgacttgcctctgttcttagtgcttgttatgatttcatagctaatgtgcttgcataaaactgttcattgcttcattttccatttaagtatattggagtaaatcacatggaccctctcagcatctggatcttcatttcaaaatgggaataatatctgccctatttcttgggttatcataataataaagggaggatcaaattctcaatgttttagggaaaagaaagaaggatgcttcatagtggtattctctgggcaagtctggttttacaatttttgaatatctttatattgttcccagcatattccttcccattccataattcctaatcagtgataagtgaacacctcagtaaataaaaatatattgaattttattgaaagattattaggctatattattgcgttttggaataatacgtattttaaaaattctgtcaaaaatacttagaagaggccgggtgcggtgactcatgcctgtaatcccagcactttgggaggccgaggcgggcggatcacctaaggtcaggagttcaacagcagcctgaccaacagagtgaaaccccttctctactaaatacaaaaaaatttagccgggcgtggtagcacatgcctgtaatcccagctacttgggaggctgaggcaggagaatcacttgaacccaggaggtggaggttgcagtgagctgagattgtgccattgcactctagcctgggcaacaagagtgaaagtccaactcaaaaaaaaaaaaaagatacatgaatgcatacatcaaaattaaaagatgaatgctgagggtctaaagtcttctcttagttcaattcttgaagaagcatgtttgctctatcaggccaggtgagaactatttagtcttctagttttcttttacaaataagttagtttactctaagggagaaataagcgttgtagaggcttcccctgcatatgtgattgaaaattatttatggtcactgtaattttgaaaaggagttgaatggccacaaataggtaagatgcagggaatgttattactgtgtgacctctgaatgtccatttcgtttgttcctattttggatcctttgcattcacactgatagcccatttgaacatccatggaagtcattttgcaattacactattgtaaaagtggctattattccttggtttgattttactatacttttaatattatttttggttatttgcacattttatttccaaatgtttggctttgagtacatctgcaacagactctcttttacttacatttctatcctttcttcattcttttatattttctttcttttaaattggctgattatcatgctactacattccaaggaactgaggagacagtcttttcctaagttataatttacacattgatgtgaaaaatcacttaaatcttctgttcttcatcttctattttgctttcaacaagtgtttcatatggttagatttcttctgcaatcaagttttcatcctttaaaaactacatatattccttattaaatataccaaaacatgtataagcaaaatatatatctcctttaaccaagcaaaatgatatttttaagcgtatataacttttgtgtctcctggaagagcttctaacccactgaaggttttcccagtgactcttgtcagaatttgtcattaagagctagatctttttagttttccattaacgttcttaactgttctgactactgatggtctgagtcctatgctaataaaaatcaagtagtgaatttccaagtacattatcctttcattatccttttgttatttagtgattcatatttgagtaaatatcttttctttgttattaacattatacaaatgcaagagattggatttttacaggaaatggcctaatttttagtaattaaactaagtttaaggatattgttttatagcaagtagtagttaataaaaaggaagcatctgctttgctgtaagatttgctagtaggtagcatttagctttcttgtggaaattaaccttgattcaaacattccatttaggtaaacagaggaaattcaacagagttataacaatatttaatttttatttccaaagcttttactcaaggtacagttacatgataagcaaaaattactaagttagtacaaatgttaatttctcaaaggatagattgcaataaagataccaacacagaagtaattttttgtttttgtttcaattttgctcccagttccaactgcctgatcagagaacttgggtaagtttcctacttatatttttgactaaagtgatgtagcattaaaaagaaaacagcttacattctaaattgctgtacagacataaataattctgaacccctttccattacgtgatatggttccagcagatagtttccctgctttctcaagctgcattctttcagttataattgggcatttagtgggatagaaattgtttacagaatgattttattcgataaatctgatgcattccacataattataccttgatacggagctctttctggacacctgggaacacgctgttaaacgaggcttcgaaatgggtcactaagtgaaaacaaccattatttggtggagcctgtatcagcatgtaaagatgcttttgataaagccttctaaaggataaaacctgaactcctgtgtagatacaggctgacatgggaattcacatctatatatcctagggcagaaattggttctggctatttgaagatataaaactaaatgtttacaaattcatgtgtaactagtgaatggatcttttagcatctagtttcacttccttgactttcagttactatttccagatccagtcagtttcaattaataatattaggggatagctttatttttattgtggaagatattcaggatacaaagaatactgcttatttagtttttacccccaaataaaacctggtcagtggaaataacatatagttaaaaatattctctaagtatatgtgtttttgtttctctttttcactgaaaattatgctgatttctgatgaatgagcaaaatcttgggatatagtttagctgtccttttaaagtcactgaatcattatatataaacttaattgaagcattttagcactaacctatttcctctatttgatgttaatttttctttatgagaaattccttcattttatctcttttgtggaatatgtaaaattgtgatttttctcattctgatagacttttaaggtttaagtttatttcaaatgtacacaaatatttatggagagagaggaagagagatcaacccactaacttaggcaaagttgtgcaatagatggggttgttttctgattatcctggcctacatttccagtattcttcctttgcctttcctggtagagatctgtcttgagtattgtgcctcacggtcctcatcttttctaaggtacagtatgactttgacaatagctctcttgttaggtggttgaagcttaaggtgttgaccccttacatacatggccaatgattgtaccaacttaccaaggcaatatagattttaagttaaactaccttttcttataatacaacagcatagtgattgccgttgcaatgctttgaaacattcccattccattgagtcacaggtttttcagagatgtgatttacatttgtattataaaacagatattagtaggaaatattaaagatatatgtttataatttttcgtggtaaaaaaacctctatgtggattgtttgtaacacaaaggatacatgcttgaggggatgaatattccattctccgtgatatgattatttcacgttgtatgcctgtatgaaaacatctcatgtatcccacagatatatacacctacaatgtactcacaaaaataaagaaaaaactaagtgatttcataatcatgactgctgaatgtgatacatggagtgggataaccataaaataggaatatttacttctcccccatatgaccatgattttgagatttctcaagattatcaagtgaataaatatagaaaatcaccaaatctacaaactttcccatcataagttatttatgaaaagttagttattttatgataaagtcatgtgtaatcgaatttgtaaaacattaggtcacataattcatggtgttgttggacatatcatttcatataatcaggttgtcactttaatagttttaatgagaaacctttttgtcatcaattattggctgccagataataaatgttaagtgcttaggacccagttgataatatcttgcctgctgaaatgtttttaaaaatactaactttatttgactagagagatagctacattttttggtaggagctagggaattgtgtctaaatattagtttgcgtcagtataaagttaatagcctcttggggactggaacagggtgaaatgacttcctcttccagacatctggctgcagataacatcaactattatatatgtaaataaaaattactgttccataggaaaaaaactgtcatttactgatcttagattagcctatgacattaatggatcacagggtaatatatttttaaaatatatgatctaattttacccctttgatttccccattctcagcaaatttcttattcctagtagtacatattgctcttttcatttgattttttcataatttaaaaacatatagctagattctgttccatttattccaatttatcttgatttttaaaatttaaaatgaatgtcaaaacttactatttctcctgcaaaaaagtgttacttttggaggaacatcacgtgactcagaccagatagcaagagagagttggggttttgatctgtgcactcaatagagttcgtgttaatccaatatcttaatctaaggtgttgactagggctgatgttgatcacagaactgccaagttaccccaactagcagatgtctgagtcacttctgtttatcttaatgtggaaacttattcttttcaactgaggtcaactgctataagagcacacattaggaagatgaaaagaaggattcaacgaaggcttttatgttgcttcagtggttgctggctgggcagaaaatgttttgtgtacgtgtgtatgtgtgttaatagttaccctcagctcgcttcccatcgtctttccctccctttccccactccaatttaatcctcttttcatttgacaccagaagccaaaggtgggggaggcttgtaagacacttgcgtaacccttattctttttcctattacctttaagaatgtcattatttagccatcaagcccataatatattttcttgtttcttgatggttttcccaaatcgaaacagtttgaggtaaagtaatcacagtgatctttcttcaaaaggagctagctattagcagctactaaagcaagacacatttctcaacagccaattgctctcaaataacttgaaggacttgtggtttatgtgtgctgaagatgaaagccgagaataatagtcatgagtaagctattttccatataaaaggaaacgtgtttctatgagatgttttgttgcaggagtctgagtatgtcagcaagatggacactcaaatgatttaaaaccactagataatgaaattttacttaaatattaaatgtacataaataaaacatttataatcattacccatgcattaactgttcttcccaataaatgtgtgtgatcatgacccttacccatgcttgttagtagtactaatcagtttaaaggccagagttcatttttcactcagaaaacttatttcttgctgggtggaatatcaaaatgattttctgcaaggaacaattagaaggaataaatgcaaatacaagagtatcataaaatatttctggattgattttttaacaaataaatccaaagtaacatggacatgctaatgctctgtctagaagggaataatgaccatattctgcagagacagaatttcctccaacctctgtgagcagcagcatcattccatatctctgccctgtgatcagtatgtgtcaaaatccttcatagtgacaaatgtgctgtccacttgcatctgtggagaatgttttagcagctgagtgattatgaatcaaacccctgagcttatagcccttactgcctcccgatgcgttcacatttgtcgtctgacaagtaaatgtatcttgactttcctctgagatttttttgtaccgtgtttgatgaaagacatttggcaaattggcagtagtaccctgtacgttgcaatttgtagctaacattaggagtccgggcatgaaatgagagggcaggctccaggataaagggggaaaaaagagaactaactagaacatgaatagtcacttgaagaatcaaacacacaatattccttttgtgagaagagatcatgttcaggccatgctgttaagactttgctctactttaagaagctgatggtattctgtccagctgtgtgtccacagaatatatgtcttgttaatttttccttctgagtaggaaatgttgccttttatttttaacttgagctcataaattaggcctccatctctgtcctgctgtctcattagcaaaaggatagtttcttgggttgaccagttgtttgaatttgcagtgatcatctcagttcttatgtgtcttctggtctagcatcacagctctttgagatttttatgtaatgcatatagaatgcaaacaccttttaaaatagcttcttgagctttctaatggcacactgccctgagaatcaaataaataatgggtgagttgatttaacaggatggcctgaaagtttgtttttctacttaaaaattcagtaataagcagcttccaaataaaatgtgagccctgaggaaacacaacatgttgagagggtcaaaggaaaggggagagtccctctggctgtggagcttaagaatcaagctaagactgggcacagtagcttatgcctataatcccagcactttgggagaccgaagcaggtggaaggattgcttgagaccaggagttcaagaccagcctgagcaacatagtgagactccatctctacaaaaagtttttaaaaaacagggatcaagccaactttaaaagtaaatgccatcttctgcttgtgactctcaaataagtgtgcaggtgtacaaaaacttgaagattataaacaacaaaaattagattactagaggggaagaattaggcagggatagttttctttcaagaatgtttctcgaaaagtgtggttacataaactgctccccctgtcttacaaggcacatgccaagttatgttatatgaaattatattaacatatgatgaactgtcatttcaacttagtctttgtctttgataaaattaatatttaatcaaaattctttgtatatgatcctacataaaaatatggcatatccagatgttaatttaatgtagtcttaggcaataccctcctatacatttagttttttctttctgagttacccatatttggcttaagctgtaattctgtaatacttcatgttctcccatgctttcagttcttttcttgggactgcatggttcttacggttttcattgcctaggtaaggcatatagcaacttttcctataatttccgttatgttaatatccataccatgatactaatgctgtcatttaatcaaataaaaagttaacttggctttattggctctcttatgtatttcaatgttcaattatatatcagattatgataaaatggcctaaccaaggtcttatggaaaaagttcgctcagcattttataagcttggttctacttatggtatttcccaaataaatcaattctgttgttgtttatttaatattgggatactacagtctctttctacaacccgtcgcagatttcatgcttcccttttaatgatgtccttggtttgccagagattattatagaagacaagatgccaaacgcttcatggtcttgtgcttttacctttcagatgtcagctattgaaaacatggcagaaaagctagagagcttcagtgccctgaaacctgaggccagtgagctcttacagtcagtgccctctatgttcaacttcagggcgcctcccaatgccctgccagagaaccttctgcggaagggaaaggagcgctatacctgcaggtaactgcacagttaattatggctgactttccagaaatctcccctctgatttcaaaaggtcttgctgtttgttttggaaattattcctgattagatgattaatagccaccataatagatctccagcacttcaaagtgttcttcatttagtgaaatataaaaatagtgtttttaaaaaattattaaatgtgaattttaacacaggacatttggttgtgataaatgaggttggaaacaatccaaatactatctacttgtctcactttgatatttatgaattttctttcacaattaattattttcatctaaaggtatactactactgtcctcaagcatatatttattaattgtcatggcattaaagaataaggccattaattaaagagaagtaaggtccataagtgaataaaactagctagtaaattttttgttactcatcagtagtaaagcttattttatgtttctggttttgtgtgtgatttttttttgctaaataaattgtgcttataatttctgaatcatctttagaaatgtgtaggtatttgactcaggcatatcactttatcttctctttgaaaaatatgtcactttctttccagaaataaagcttttatgggtacataccttgatggatgaagtctcaggattttgtctgatctgataccactctatgcatagggagttatcactgtggctgacatgtaaaatgagttgaaacatttgaaatctgtttacatcaacccagaatcagaaactcttatcatatttttatccccttatctggttcaattttgtgaatgtaaaaatattgagttaataagagagatgtataggagtaatcaaaactaaagtctattttcataaattgcttgcttataagtgaacaaattcaaccagatcttagaatgcagtctttatttgtagagttatttatattaatatctgtgaaatggctttgttgtaaattttaaataccaaagaaatgtgagttccatgcaagattaattgaatcaggaataagcatctggctgctgtgtggcatgagtgaaatatagtcaactgtgctgactttctcttataaacatcttttcataacagatactgtggcaagatttttccaaggtctgcaaacctaacacggcacttgagaacccacacaggagagcagccttacaggtctgacaatgatatttgctaaatatcttgataaatattgtaataattaaagtttattttaataataaaataataattaaagtttataataattaaagtttaaattttatgcgtgtctgaatatatgtctattcaattttgagtcaagaaagaattgactaatggctaggatcaaaattagaagagttccagtttctttaatcaaggcttcctacctctcagtttaaaagttctagcacagtgtctaggacagaataagtacttaagaaatgctagccattttaaatattattttttattatcatttgttctcttttctcaataattaggatgatcttaattgacaaaaatcataactttgcagccttccttttccaagcctcaaatctctgctaggagttaataacccatatgtactttttttcccccagcacagctaagtcattttccatggattccaataggaggtttaaaggatagattttaggctgggcatggtggctgacgcttgtaatcccgacactttgggaggcagaggcaggtggatcccttgaggtcaggagtttgagatcagcctggctaacatggtgaaaccctgtgtctaccaaaaatacaaaaattagccaggtgtggtggctcacacctgtagtcccagctacttgtgagactgaggcaggagaatccactgcacctgggaggtggaggttgcagtgagccaagattgcaccactgcactccagcctgggtgacagagtgagactctgtcaaaaaaaaaaaaaaaaagaaagaaagaaagaaagaaagaaaaaaagaatagatcttaaacctgggaagtcaggggagaagaaaatatgaaactagaggtaggacagataaaatagagtatattatagaaaaacgggcaattttatcaataatttcctaaattacctcttagtttattctattacatgccaaaattagtcatatgacacattggacacatctaattttaatattgtttagaaagattagattgaaaatagacaacattactctttccaattttaaaatataaactacattatttaatgttcaatgccttgcacacagtattagttactcgtaaatatttcttcaaagaatgaatattatacaacttaagtaatatcataatgtcattctcctttgaaattcttatacattgcatgtatgcaaaattattttttcctgagtgctaagtttttctattaaaacaaaaagtaagttatttatcagatttcaaatatttttttaatggtaaaataagaaaatgggtcatttgaggataattgaaatcttagaagaaagctagagggagctaaacttaaaacatcagttttctcaaattccttgctttcctacctgttttataaatcactaattataagtgatatatttccaatttatacatgatagaatgcacttgatataacaggtctcagagagatgtaatactgggaagttttagatgatttccccttttgagaaaattatattaccagaaattctgcttaagtggaaggaaaggtttccacactcatgttttgttatggcaagagtactggaaactatgttatcacgttcattttactctttctttgtacataaatttcaatggttttattccacccaataatggctctattattgtgcatatatatttttttaaaccacaaaccagcattttggtatagctggagagcttacacaattatttgtccagcccctctgggtttttttttttttttttccttgcagaagaattccaatgaacagtgtagaaaaaatgaggaaaacaaaatcacaagtaggacaccacaataataactgctacagggaagatcaattgaatgttaaaatgagtggatatagtgaactagatagattttatagtttagttaatgtatcagtgttggtttaatagttgtgacaaacgtacctgaaacatattaacaataggggaaaatgggtactatgtactatctttgcaaccttttaataaatctagaactcttctaaaatgataagtttatttaggccaagtgtggtggctcatgcctacaatcccagcactcagacaggctggggcaggaggaccacccaaacctaggagttgaagaccagcctggacaacacagcgagaccccatcttcaaaaaaagaaaagtttatttaaaaaataaaaaattagtgagtgaaagtttaaagaggatatttgcacagccccaaaatatcttctgcaaaatatttgttaattagaaagagaaaaagtaataaccttataatggacaaacctggcagatactaccttatccaaatgatcagggttaacaatgccagaagttagacatgtcagcatcatgtacccttgataggatgcactgagagggcatattgcctctgtgctattttcccccaaaatttataacctcactctaataatgagaaaatatcagaccaacccaaattaaggaaaattctaccaaattcccaatcggtattattcagaagtgtcagggtaattaaaggcaaggaaagactgaggaactgttagagactgtagaaaactaaggagacatgacagctaaatgcaatgtgggatcatagatcagatcctggaacagaaaaagagcactggagaaaattggtgatattaaaataaagtctgtattttagttaatagtattgcatcaatgttaatttcctagttttaatgaatgttaggtaagatgttaacattggaggaactgaggtgaagggtatatgggaaccctttgtactatctttgcaagtcttctgtaagtctaaaattatttcaaaaagaaaaaattaaaaaaagtaaaatggtatgtaaatgatacatgaattgtctgcttcctgtggctgacctgtgccttctggaaagttctattaggttttaatactttatgtagtaaaagttaaacatggtccctatgtagaaaattatctcttcagaaagataaataccagtagaccacaagctccttgacagtggaatccacctttttttttttttttttttttttatatagacagtaggtctcactctgttgctcaggctggttttgaactcctggcttcaagcagttctcccacgtcagcctcctgattcttagcaggagaagggattatagtataggcaggtgccaccatgtcccggagaatccatatcttactcatctctgtgtccttgatgcatcagcccctctgttttacaaatgaaaaaattcagatttacatatgctaattgccttccgcaaagtctgctactaatagagtcaggattaaaacccaggcccagagctctcacttcagcgtttttattttacatcatgatctcaaaggctcgtctgacctccatgtctacatccaataactaggaaggcttaatagtatactgcccatgactgtgttatgtgttcgttttaagaatttctaaaacttaggctcttattggaattgtgtagaaggaagtgatttttttatttagaacattctttttctggccaagactttagcagaggagagatagaaagtaacaactgatcattggttagaacatgcttatttagatttgagaagatggtgcttactagatttggaaaagaccctttgtgtgcaagcagaaagttagaagcatggcagaaacataatctctcttcctcatgatttgtgtagaaagtgttttgggtgaaaaattttttctaaagtgttttgtgggagtacgtttactgtaacagggttttctaggttattctgctaagcacagaataaattgtgctaaatatagcatggttctcattgcagtgggccttggaggtaaacagagttattgcagagaaggtcataactttatacgcatttaaaaaaaaaaaaaactggggctaaaatattacaactaccataatgtggggtttcacacaatttttattaatatcgtaagtgaggaaagttgaagaagcttattatgccagaacagttttttaagggggaaaaatcaaatcagtacttgtgttggtttagtgatactatgccaaagtaactagttcaacagattatttttcctactgaactgactagacttctggcatcacataaggacaaccacagaagcccaagaactctagtggaatggggtgacttctgctttagagcacttgaaccactgactctgcattcagaagtgggaggagaagggcccttcacacatggaaggatgagttaagaattttctgtcctctaagattgaagttttcatttataagtcatttggaggctggacgcggtggctcacaactgtaatcccggcactttgggaggctgaggtgtgtggatcacttgaggtcaggagttcgagaccagcttggccaacatggtgaaactctgtctctacaaaaatacaaaaattagccgagcatggtgacacgtgcctgtaaccccagctactcgggaggctgaggcaggagaatcgcttgaacccaggaggcagaggttgcagcgagccgagattgtgccactgcactccagcctgggtgacagagtgagactccatctaaaaaacaaaaaaaaaaaaggtcatttggagaaagttaactttttttttcaagtaacatgccccccaaaatcataaacaaatgatggcaaataatggaatctttaccttaaaatgacagaggacaataccttctcaattactaaaaacccttttcttcttcattaatgagagctaggggaaggaggccttgcatttttgtattttcattttatgactaaaggaaaactttaaaaataatttatgattttttttatcacatggaagacagaaacaactaaccaaccaataataagtgctttcatgaaaaaccaacctgattcagactgctagagactcgttcagaaaaagagaaatgaaaaatagggggtaataggaagggagataaatggaagccctttgctttcattccaaaaagagaacttagtggcattattattttttttataacagtttaaagattaacagagaaaaggctttgtggtagctgattcttgggtatcagactaaattatttacattgttttagttttaaaagtctaaaatattgattgctattttgaaactgataatggaattttctttaggattagcacctgagaaaatgaatttcctgagaaattaatcagactgaaattttgaattaaaaagtgatattttattgtatttgaaaactatatgaatgttttttgtttgtttacaaaaaaattagttgtattgtcctaagcagaagataaaacaatgctactgttcctcaatgtgctttattttatgaggtttacttaaaatattggtactgattaatgaatttgggagcaatcaaatcactaatattttattatggtttctgataaagtcatgaaagtctttaaagcaatcagagtatattggaattgaaatcttaattgtgtgaatagtattctccctgtgccttttctttaaaatgttgttttatgagtggagatgatttttgatagctggctaactagtcttgagaaataccttttaatgtgcttgctaatattttctctttgtttatttttcagatgcaaatactgtgacagatcatttagcatatcttctaacttgcaaaggcatgttcgcaacatccacaataaagagaagccatttaagtgtcacttatgtgataggtgttttggtcaacaaaccaatttagacagacacctaaagaaacatgagaatgggaacatgtccggtacgtaataaattgtgttataagtcaaagatgacttctttttcgtgttttaaaagataataagataatgtgatctttcttcttttattccattttgacgccaaaatcaggtcttattgtaaaaattcccaggaagtttctgttgagattttagaataatgtgagcaatgtgatcattaatttataattcagtggccttatttggattatgtttttatcttcctaatgggtaattttaagcaaagaggacaatgacctaaactcgcaggagacttatgaaacaagatttcctaaaatacaggggacagtcttttcacctgttggcacagaatgtggcctctaggcatggcagagtctctagagtagcagccccagaatgtcaccctctgaatattaatctagaaagcatagctgcttttgtaaaaggcctgcagctcagagaacctctcttggtaatttttgttaagactgggaatatgagactattgacatgatcagagcaacccatagcaaatgatagtagtgctttgtttttgtcacaaattcttatatgaaagtaagataaaagtaactggcataaaactagacttttcttaactgggaccttgccagcacatatttagcagaagggattgtaggttttctagtctttggcttccaatagttagataataagtcattaagtaacatttgccagctggcatatgtgtgcagagccaacctgtgcagtcacaatttgtctccagagaataaaggttatgctttgggggtaggggaggagagatacagaattcaggcaaagagatttaagaacagaaaaaatttggattaatacagactagcaatctttatttatggaattttttaattattaatctttcttcccctataaaggcacattatttatgatcttgtctgattagtacttaaaagtatatactgttcgtctccctcaaagtcagcaatttaatgatcatagttttaaaatattagattttaggtagagaagtataatccaatgtgcaaaactggccactctaactgtgtgtacccttatagcatacaactataattttcttatcaaagttattttaagaaaaaaggttaaacatgtaacatgtcaaagttaatactttttgaccaagattgtaacctcttttaggtgaggggatgttctaacctcctgtttttgtcatatagactattgtgatgaactattatattacagatactttgtaggcaagataaacaacaggaagctaatgttggtgtaaagctcaaccacatataaagtgcttaagtgtaaaagtggtttaagtttatgtaagccttacaccaatccagtgatacgggtattgtgagtcttgcagtgcataggcaaggaaggggaagatcatcctgtaatcagcatatctaatattgtccttttaatactgcaccaacccctggactggagtgttctgagtcaactcacagcttcgcccagcaaaccaggatgcagaattttcagtgtgcctttaaactgtattttgttatatgctttagcatagtagccaaaaaataaataaataaataaaaaggcatgttgactgcaaccaggacttcatatagagtgtctcttggcagaatctatttaaaacttgttcataatttgtctcactctaaattctcattatgtgaatacaaatattctcatgtcacaatagaggtaaggaaaagctagtgagagaagcaccttctttgcgagactgtacttcatgatttcagtggttcaatatattcccaaaggaccgtcatgggcatgtgtattatggtaaactggggagactttgactttctaaagttattattattaatattcatagggcatgttttaagaaacagcactgatcaaattcataaggagtgagtttccaaataagttgctagataaacaataatctttgtcataaaaggctttctgctccacacaggtacagcaacatcgtcgcctcattctgaactggaaagtacaggtgcgattctggatgacaaagaagatgcttacttcacagaaattcgaaatttcattgggaacagcaaccatggcagccaatctcccaggaatgtggaggagaggtaaagctgtcttttactttttaaactctgtgacgactgaaatgaacatgttttaaaatatacttgctatgctcacttttgtggcactactattacttcagtcaccaaagactggtatatatttagtacatattaaataccacattaaatgcttccaagcattttacatgtgttaattaatttaatttcatcataaccctatgagatagccactataattttagcagtgaaggaatggagacattgaagcttaaaccattgtgtcagaggtcacataagtaatcaatgggattcaacctgagctctctggttccagagcccataattttaccaggatttagctatctgatagctgaatagaatctgttatcaaaatttcagaagtagaagagaaagccgtcacagggattcagttgaatcactgatcaatagtggctactattatacatcataaattatatatattacaggtaatatatgattctatatacctgtattatacataaatacatatatgtatattctgtatatatgtaatatacatattatagtacatatgtatgtatgcatttatatatgaaatacccatggagtttcccccaaatatattttacatagaagcttttatagtcttcttaagattctattgctactttatgtcctcttaagtgactactcatttaattctggtctgtttgtttcagtgggtatgaacatccttgtttttactgccctgatgcactggctcccttttatcatcaccaacattaagcatgaatagcttaattcatttaaaaaagcttttaatgctgttaatgataatacttaacagttacccagcacttcacattgcatatgaagttaatgaaacactatttcaccaaaactactggatttaatttttcttatctgtaagctataattaaatatctattgttgagaagtagacttttctgaacacgactatatagtgacctattaaattcagatgctacattgtaaatttcaaaataacatgaaattagttaaaagttccattatttttcatcatacaagtattattggattagtgtcctctgtttttgatgttatcaaaagtcaaaattaattattttatgtaattttttcaaggcaaacatcaaataaacattttttactaaaataacaaaaaaaatgaccacttctgtttttcaacttgtataaaagtgtatcaaagaaaaacaagaaaaaagacccttccagtctctgagaagtctgataactacaccagtgtgcagttggatgtacctttccctttacttgcccatttgtgtgtgtgtgtgcgtgtctgtctgtctgtttgtgaaagggagagaggaagcagatgatcagaaggacaaagtagcaagaacaagcaagaaacagtgacgatcttatactttgataatgatatttacttgatgcaaataagaactgttgaacaaaacacaccatttgggttctgagatgcctattcaaattttctagcctttaattggcgatttgtgagcctgtatagttgcaacatctggcttcagcatgtctaaacagcacagaaataagaaggttgagtcatctaagtttttcccctgaactcctaccaggctacttttgatgaataatttattctctgtaaattgccacatttgaaaacttaattaacaaatagattttcttaattatgttggcttttgttacttttgattttcatccatgcactctttttgttcttttactttttctttcttttttttaaataaaaattttaatccactcatgcaagcaagttggcagtgtgtttggaaactaatttatgtctgtgcaaaagatgttttcaccattctttgataaaagaggttaagcgattgtttttattaaaagcttaataatgatatgactttttctggtcaaatggatttttactatgtgtgtttgtcacatccaagattgttttatttattttttaatcctgggaaatctgaatattaaattatactcatttttgttatgtgggaaagtgatgggggtacattgtaatacctgagctttttccaccctggcgttttcctgagaaacaaggaactatttcacattcagactgtaaaaaataatttgaaaatagtacaaataagtgagctgtcaattacttccaaatatgggtagagtggttaggtggaatgtaccacaaatgtcatctagtatcagtaaataccagttgtttcttggtaactactttaacattgtctttggacttttagagtcactttaggcatgtgtattgtagctacggcccatgagtgatatgaattttccagaaatctattattttaaatggtgggtacttacatggcaattaggtaaattgtgctgagaacatacttatgtgcctttttatatgatatatatagcaatatcaattatcaagcaaagtctgataagaaatgggagaccaagattgtttttcgggttctgccagaggcttcatttataatctgaacaatcatacaattatttttttctttatcttcccatttgtgaagtcacattattttttcatggttgacgtagagcataaacaataaaacatttccgatgttaagtgttgaaaatctaaactgttgttgggaagacataataaaggaacaaattacaattttaaaaatgaaaccaacaattggactttttttttaatgcttttgaaagaatgaatggcagtcattttaaagatgaaaaggctttggtgaccagtcaaaattcagacttgctggatgatgaagaagttgaagatgaggtgttgttagatgaggaggatgaagacaatgatattactggaaaaacaggaaaggaaccagtgacaagtaatttacatgaaggaaaccctgaggatgactatgaagaaaccagtgccctggagatgagttgcaagacatccccagtgaggtgagtaccttgggtgactttagaaactaagctagagtagatccatgtacggttgcaattcctcctgtgataagcaatttgtgagttataaatcacaaaaattaaacttgaattagtaagggatacatggtggatcagatttaaatagatgaaaataaggtggctatcaacataatccacaagcatataaatacatcaggtttggtgcaactctgattaacctgaggtgggaaagataaaatgaaaattacataagtacacaatcatttattgttagactctacctataaaactcaaagaaaaatagagattttgacgttatctaattatacaataatctggcatggtcatcagttaagtataattgagataaacttcacttcagtagatatatatgtgatctatatagatgataactttttaaatgaaaagaaataaccaaacagttaaattgatgggactattatattttcatgatggatgttgactaaatattgtcataattagctttactttaaatggaaataatgaatatatgaattctgtctctgcctattactgactaatgtgtcactgactttaactctttatctcaaatatatgcttggctttagttactaaaaatcttaacagaaatatatttttaagacatgatgtttgtaagtatttataaaaacccaataattgatgcatgctactttaccttgcagatacaatatgaagtttgtcagttgtatagatagattcaaatgaaagtgatttgattagataacaaatgaaaagaaaatttctgtgtttttcgttggttcattttaggtataaagaggaagaatataaaagtggactttctgctctagatcatataaggcacttcacagatagcctcaaaatgaggaaaatggaagataatcaatattctgaagctgagctgtcttcttttagtacttcccatgtgccagaggaacttaagcagccgttacacagaaagtccaaatcgcaggtacagattttcccatagtacagcatcatggttacattatgcatgaaacgtacatttcctttgattaccaaaaagcaaatattctatctttgaaatattttagaatccaaatggggtcagatgcctttctaaaaatgttcatatctttactgtatttatgaccaaatccaaaatagttaagcaagaaagcaattaatttagctgcattctgtatagaaattttatgacaagccccatcctacacttatctttccttgactttgcaattctcttacttttgtacagttagttcatcatgtttgtttacaaatatttatgtattacctcagagtcattttccgtgtctatacttttgtcaatgtaattatattttaagatttttctgaaaagtgaattctattttttgtccccttctatgtctagtaaattgttaggtgtagttaattagcaagtcatctcatgttgtaatttaatagtaaaatgaggatcagaaaggaagtgagttgccaaaggtctacaccaacttactggcagatttggaaataaaacctgtcaatttaaattcaacaaatgaatgagtgaatgaatggtactcaaatttattaggctctacaacattgtatcagcactatggtaactaaaaataaatctatttaagggtccataaatagcaattaaaagagcctcagtgtttttgttacaaaataaaggaagtcggtacttttttgtttgacatccacactcaaccggattgttcattcaggtcaattaaaaataaagaaacttcctattaccatatttattgggcactgtggtctaattgcctgatccattagttcattttgtatgtggcctgacctgcaatgtgaccatattagtttgtacatttggaaatgattttctatttgggtaagatgtctgggtttgtcttaacagcaaatgtaataatatcccaaggaagttgggaaaaacattgtgtcaatgggataatacaaatcattaaataatattcaatttagtaaaaagttctgagatattatgtatggtaataggtaaaataaatgttctttctcaactgaagttaaagcagccaccatctacagaggctcctagagcctacctccatgaacttaagaacatcacttaaagactataggtaccatttcttcattgtaaaaggggtaagtggatttttattcaatggggataaaaatgaagtttccagtttttaacattaaaggtaaactagctagagtagacatttcatttttacttagagacatccataaggggtggctagtatttttttttaacccttgatttcccattcttccatccttgttgattagagataacttgagtatcaaggtttttggttttttgttacttgtttctttgtttttgagacagggtctcactcagctgctaagactggagtgcagtggtgcaatcacggctcactatagcctcgacttgctgggctcaagtgatcctcccacctcaggcatctggataaccgggactattgacactcaccactatgccaggctaatttttcaattttgtgtagagatggggtttcactatgttgcccaggctggtctcaaattcctgagctcaagcaatcctcccacctcagcctcccaaattactgggatttgtataggtgtgacccattgcacctggccatggttttttctttttaaatttcttttaattagtccaccaaaaatgcttcttatttattgtaagatataatacctaaacactccagaaactgccagaagtgacagaaagcaaaagggcctgaaaacctacagataagggatataattataatacattttagtaccagcattttgacataaagtcccaacccagctggactgttactgttataagaaacactagcattttgcaatcctaagtcatatttttcttgttacttgatcatgttatatagattagtttgaaaatggtcaggcccttttgcaaattcactttatttcataatatcattcattcgttcatttattaactaccagctatatgctgggcactgatccttatatatgaaaatgtttatttcctttgattaccaaaaggcagatatgctgttttgccattttctagaatctaaaggctcagatgctttagtcaaagcattcatatatttattctgtaatttttatagtctgtaatttttatagtgattgaattgaaaatagttgaccagtacaatagtagctgcattttgcatgtgctctccctcaagaaactctatccggtaaaaattaatttcatggtaataggtactatttatgtattacctcagtcaggcacactgagctaaacactttatgtaagttagtgcatgtgattcctccacaactcttggaggccaatactgttattactatcatctgttttataggaggaaagtaaagcttaaaaggttaagcaacttgctcaagatcacacagctaggtgagtagaggcaggtttaaaggcaggattaaaatttaaattccaaaattttctttgtactcctttttatcttcccaaatatcagaatttgttttaactctttcagagtactctttatcttgttctctaaaagtaggtacataatcagaatagataatttaggttgaatgctcacttaacccatactttaaactctgccaaagataagtactctatattatttattcttaatttcttaggatctatcacagagcctggcatagagtagatgcttaagaaatatttgttaaatggatcatgagatattgtagaagtccaaaaggcaaattgcatacataaaagtcaaatgtgtacatttagagcgatgacccagcaaatcaaaaatcagcctacaagggtaaattttctaactaaatgcaatgattacggaagaaaccacagactggccacatgtctcagcatgactcccagagatgaaattctgcctaacaacagaggcattttgtctttgtttacagacagtggaatgtctttggcaggactttaatgattccacttcagcagcattttgacaagcaagtttagcaatggatgagaccaacaatagcaaatcaacagtgaaaagttcacttacaagtcaagaccaaacatttcatttgaatattttgcttggcagtaaataggggactctctgaacagttatttaaaatttgacatgataatagggaagaaagagtacttcctcacagagcacctccatgcaccttctgctcagcagacactggaaaacaagttgattagaacactgttgggtcttgtgtttggttttatttttttggtagagctgatttgatccacctcaacttatgggtgccaggactgagtatgtcaagcatggagggaaattggagaaaagacaatggattaaaagttgggcagaaatacattttagttatgcttctcccactatctatctaattgagtgactttgggcaagtcactcaagcaccttcagtgctttcggttataaagtgtaggagtcaggctgtatcctctactaggccacagctctgtcaaggtaggtctatatcttattaatatttgaggtttcagtcataagcacacaataatatttttggtgaattgaacatatgtagtggatggatgactgtatttatagttgaacaggagactgactcatttttctcaatggaagcactatttgcattttaggtaggatagttctttttggttctgtagcgtgtgtcacttttggggcccctaggcactaaaggccagcagtaatcccatgtggtttctacaaaaaatatgccttctttgccaaacacacccatgaaggatgcccctactcagggtcccatccctttccatttaccaacaatattctttgaactaaaagtgatgtttttcaaatgccatttactgagtctctctcctttttaccccaggcatatgctatgatgctgtcactgtctgacaaggagtccctccattctacatcccacagttcttccaacgtgtggcacagtatggccagggctgcggcggaatccagtgctatccagtccataagccacgtatgacgttatcaaggttgaccagagtgggaccaagtccaacagtagcatggctctttcatataggactatttacaagactgctgagcagaatgccttataaacctgcagggtcactcatctaaagtctagtgaccttaaactgaatgatttaaaaaagaaaagaaagaaaaaagaaactatttattctcgatattttgttttgcacagcaaaggcagctgctgacttctggaagatcaatcaatgcgacttaaagtgattcagtgaaaacaaaaaacttggtgggctgaaggcatcttccagtttaccccaccttagggtatgggtgggtgagaagggcagttgagatggcagcattgatatgaatgaacactccatagaaactgaattctcttttgtacaagatcacctgacatgattgggaacagttgcttttaattacagatttaatttttttcttcgttaaagttttatgtaatttaaccctttgaagacagaagtagttggatgaaatgcacagtcaattattatagaaactgataacagggagtacttgttcccccttttgccttcttaagtacattgtttaaaactagggaaaaagggtatgtgtatattgtaaactatggatgttaacactcaaagaggttaagtcagtgaagtaacctattcatcaccagtaccgctgtaccactaataaattgtttgccaaatccttgtaataacatcttaattttagacaatcatgtcactgtttttaatgtttatttttttgtgtgtgttgcgtgtatcatgtatttatttgttggcaaactattgtttgttgattaaaatagcactgttccagtcagccactactttatgacgtctgaggcacacccctttccgaatttcaaggaccaaggtgacccgacctgtgtatgagagtgccaaatggtgtttggcttttcttaacattcctttttgtttgtttgttttgttttccttcttaatgaactaaatacgaatagatgcaacttagtttttgtaatactgaaatcgattcaattgtataaacgattataatttctttcatggaagcatgattcttctgattaaaaactgtactccatattttatgctggttgtctgcaagcttgtgcgatgttatgttcatgttaatcctatttgtaaaatgaagtgttcccaaccttatgttaaaagagagaagtaaataacagactgtattcagttattttgccctttattgaggaaccagatttgttttctttttgtttgtaatctcattttgaaataatcagcaagttgaggtactttcttcaaatgctttgtacaatataaactgttatgcctttcagtgcattactatgggaggagcaactaaaaaataaagacttacaaaaaggagtattttt

SEQ ID NO: 11 - DNA, 4891 bp, Homo sapiens
  misc_feature: NM_001105078.3
agccttctttcctcctcgcccgcagtctcgcggagccctgctgcttatctacgttgctaagccgggcgatttccttgttcctcctgcgaaacggtgcggtctggacacgtctccggggtgggtcgtccggccttcgatcttagacgaattttacaatgtgaagttctgcatagatgccagtcaaccagatgttggaagctggctcaagtacattagattcgctggctgttatgatcagcacaaccttgttgcatgccagataaatgatcagatattctatagagtagttgcagacattgcgccgggagaggagcttctgctgttcatgaagagcgaagactatccccatgaaactatggcgccggatatccacgaagaacggcaatatcgctgcgaagactgtgaccagctctttgaatctaaggctgaactagcagatcaccaaaagtttccatgcagtactcctcactcagcattttcaatggttgaagaggactttcagcaaaaactcgaaagcgagaatgatctccaagagatacacacgatccaggagtgtaaggaatgtgaccaagtttttcctgatttgcaaagcctggagaaacacatgctgtcacatactgaagagagggaatacaagtgtgatcagtgtcccaaggcatttaactggaagtccaatttaattcgccaccagatgtcacatgacagtggaaagcactatgaatgtgaaaactgtgccaaggttttcacggaccctagcaaccttcagcggcacattcgctctcagcatgtcggtgcccgggcccatgcatgcccggagtgtggcaaaacgtttgccacttcgtcgggcctcaaacaacacaagcacatccacagcagtgtgaagccctttatctgtgaggtctgccataaatcctatactcagttttcaaacctttgccgtcataagcgcatgcatgctgattgcagaacccaaatcaagtgcaaagactgtggacaaatgttcagcactacgtcttccttaaataaacacaggaggttttgtgagggcaagaaccattttgcggcaggtggattttttggccaaggcatttcacttcctggaaccccagctatggataaaacgtccatggttaatatgagtcatgccaacccgggccttgctgactattttggcgccaataggcatcctgctggtcttacctttccaacagctcctggattttcttttagcttccctggtctgtttccttccggcttgtaccacaggcctcctttgatacctgctagttctcctgttaaaggactatcaagtactgaacagacaaacaaaagtcaaagtcccctcatgacacatcctcagatactgccagctacacaggatattttgaaggcactatctaaacacccatctgtaggggacaataagccagtggagctccagcccgagaggtcctctgaagagaggccctttgagaaaatcagtgaccagtcagagagtagtgaccttgatgatgtcagtacaccaagtggcagtgacctggaaacaacctcgggctctgatctggaaagtgacattgaaagtgataaagagaaatttaaagaaaatggtaaaatgttcaaagacaaagtaagccctcttcagaatctggcttcaataaataataagaaagaatacagcaatcattccattttctcaccatctttagaggagcagactgcggtgtcaggagctgtgaatgattctataaaggctattgcttctattgctgaaaaatactttggttcaacaggactggtggggctgcaagacaaaaaagttggagctttaccttacccttccatgtttcccctcccattttttccagcattctctcaatcaatgtacccatttcctgatagagacttgagatcgttacctttgaaaatggaaccccaatcaccaggtgaagtaaagaaactgcagaagggcagctctgagtccccctttgatctcaccactaagcgaaaggatgagaagcccttgactccagtcccctccaagcctccagtgacacctgccacaagccaagaccagcccctggatctaagtatgggcagtaggagtagagccagtgggacaaagctgactgagcctcgaaaaaaccacgtgtttgggggaaaaaaaggaagcaacgtcgaatcaagacctgcttcagatggttccttgcagcatgcaagacccactcctttctttatggaccctatttacagagtagagaaaagaaaactaactgacccacttgaagctttaaaagagaaatacttgaggccttctccaggattcttgtttcacccacaattccaactgcctgatcagagaacttggatgtcagctattgaaaacatggcagaaaagctagagagcttcagtgccctgaaacctgaggccagtgagctcttacagtcagtgccctctatgttcaacttcagggcgcctcccaatgccctgccagagaaccttctgcggaagggaaaggagcgctatacctgcagatactgtggcaagatttttccaaggtctgcaaacctaacacggcacttgagaacccacacaggagagcagccttacagatgcaaatactgtgacagatcatttagcatatcttctaacttgcaaaggcatgttcgcaacatccacaataaagagaagccatttaagtgtcacttatgtgataggtgttttggtcaacaaaccaatttagacagacacctaaagaaacatgagaatgggaacatgtccggtacagcaacatcgtcgcctcattctgaactggaaagtacaggtgcgattctggatgacaaagaagatgcttacttcacagaaattcgaaatttcattgggaacagcaaccatggcagccaatctcccaggaatgtggaggagagaatgaatggcagtcattttaaagatgaaaaggctttggtgaccagtcaaaattcagacttgctggatgatgaagaagttgaagatgaggtgttgttagatgaggaggatgaagacaatgatattactggaaaaacaggaaaggaaccagtgacaagtaatttacatgaaggaaaccctgaggatgactatgaagaaaccagtgccctggagatgagttgcaagacatccccagtgaggtataaagaggaagaatataaaagtggactttctgctctagatcatataaggcacttcacagatagcctcaaaatgaggaaaatggaagataatcaatattctgaagctgagctgtcttcttttagtacttcccatgtgccagaggaacttaagcagccgttacacagaaagtccaaatcgcaggcatatgctatgatgctgtcactgtctgacaaggagtccctccattctacatcccacagttcttccaacgtgtggcacagtatggccagggctgcggcggaatccagtgctatccagtccataagccacgtatgacgttatcaaggttgaccagagtgggaccaagtccaacagtagcatggctctttcatataggactatttacaagactgctgagcagaatgccttataaacctgcagggtcactcatctaaagtctagtgaccttaaactgaatgatttaaaaaagaaaagaaagaaaaaagaaactatttattctcgatattttgttttgcacagcaaaggcagctgctgacttctggaagatcaatcaatgcgacttaaagtgattcagtgaaaacaaaaaacttggtgggctgaaggcatcttccagtttaccccaccttagggtatgggtgggtgagaagggcagttgagatggcagcattgatatgaatgaacactccatagaaactgaattctcttttgtacaagatcacctgacatgattgggaacagttgcttttaattacagatttaatttttttcttcgttaaagttttatgtaatttaaccctttgaagacagaagtagttggatgaaatgcacagtcaattattatagaaactgataacagggagtacttgttcccccttttgccttcttaagtacattgtttaaaactagggaaaaagggtatgtgtatattgtaaactatggatgttaacactcaaagaggttaagtcagtgaagtaacctattcatcaccagtaccgctgtaccactaataaattgtttgccaaatccttgtaataacatcttaattttagacaatcatgtcactgtttttaatgtttatttttttgtgtgtgttgcgtgtatcatgtatttatttgttggcaaactattgtttgttgattaaaatagcactgttccagtcagccactactttatgacgtctgaggcacacccctttccgaatttcaaggaccaaggtgacccgacctgtgtatgagagtgccaaatggtgtttggcttttcttaacattcctttttgtttgtttgttttgttttccttcttaatgaactaaatacgaatagatgcaacttagtttttgtaatactgaaatcgattcaattgtataaacgattataatttctttcatggaagcatgattcttctgattaaaaactgtactccatattttatgctggttgtctgcaagcttgtgcgatgttatgttcatgttaatcctatttgtaaaatgaagtgttcccaaccttatgttaaaagagagaagtaaataacagactgtattcagttattttgccctttattgaggaaccagatttgttttctttttgtttgtaatctcattttgaaataatcagcaagttgaggtactttcttcaaatgctttgtacaatataaactgttatgcctttcagtgcattactatgggaggagcaactaaaaaataaagacttacaaaaaggagtattttt

SEQ ID NO: 12 - DNA, 4900 bp, Homo sapiens
  misc_feature: NM_001105077.3
ccttgccaagtaacagctttgctgtccaacatcgtgtgctgcttcgcgagaaagtcacattcggaccctttggctagattgcttattcatagggcttcttgactaaagcccttggagcactgggtttttcttgaagtatatgatcttagacgaattttacaatgtgaagttctgcatagatgccagtcaaccagatgttggaagctggctcaagtacattagattcgctggctgttatgatcagcacaaccttgttgcatgccagataaatgatcagatattctatagagtagttgcagacattgcgccgggagaggagcttctgctgttcatgaagagcgaagactatccccatgaaactatggcgccggatatccacgaagaacggcaatatcgctgcgaagactgtgaccagctctttgaatctaaggctgaactagcagatcaccaaaagtttccatgcagtactcctcactcagcattttcaatggttgaagaggactttcagcaaaaactcgaaagcgagaatgatctccaagagatacacacgatccaggagtgtaaggaatgtgaccaagtttttcctgatttgcaaagcctggagaaacacatgctgtcacatactgaagagagggaatacaagtgtgatcagtgtcccaaggcatttaactggaagtccaatttaattcgccaccagatgtcacatgacagtggaaagcactatgaatgtgaaaactgtgccaagcaggttttcacggaccctagcaaccttcagcggcacattcgctctcagcatgtcggtgcccgggcccatgcatgcccggagtgtggcaaaacgtttgccacttcgtcgggcctcaaacaacacaagcacatccacagcagtgtgaagccctttatctgtgaggtctgccataaatcctatactcagttttcaaacctttgccgtcataagcgcatgcatgctgattgcagaacccaaatcaagtgcaaagactgtggacaaatgttcagcactacgtcttccttaaataaacacaggaggttttgtgagggcaagaaccattttgcggcaggtggattttttggccaaggcatttcacttcctggaaccccagctatggataaaacgtccatggttaatatgagtcatgccaacccgggccttgctgactattttggcgccaataggcatcctgctggtcttacctttccaacagctcctggattttcttttagcttccctggtctgtttccttccggcttgtaccacaggcctcctttgatacctgctagttctcctgttaaaggactatcaagtactgaacagacaaacaaaagtcaaagtcccctcatgacacatcctcagatactgccagctacacaggatattttgaaggcactatctaaacacccatctgtaggggacaataagccagtggagctccagcccgagaggtcctctgaagagaggccctttgagaaaatcagtgaccagtcagagagtagtgaccttgatgatgtcagtacaccaagtggcagtgacctggaaacaacctcgggctctgatctggaaagtgacattgaaagtgataaagagaaatttaaagaaaatggtaaaatgttcaaagacaaagtaagccctcttcagaatctggcttcaataaataataagaaagaatacagcaatcattccattttctcaccatctttagaggagcagactgcggtgtcaggagctgtgaatgattctataaaggctattgcttctattgctgaaaaatactttggttcaacaggactggtggggctgcaagacaaaaaagttggagctttaccttacccttccatgtttcccctcccattttttccagcattctctcaatcaatgtacccatttcctgatagagacttgagatcgttacctttgaaaatggaaccccaatcaccaggtgaagtaaagaaactgcagaagggcagctctgagtccccctttgatctcaccactaagcgaaaggatgagaagcccttgactccagtcccctccaagcctccagtgacacctgccacaagccaagaccagcccctggatctaagtatgggcagtaggagtagagccagtgggacaaagctgactgagcctcgaaaaaaccacgtgtttgggggaaaaaaaggaagcaacgtcgaatcaagacctgcttcagatggttccttgcagcatgcaagacccactcctttctttatggaccctatttacagagtagagaaaagaaaactaactgacccacttgaagctttaaaagagaaatacttgaggccttctccaggattcttgtttcacccacaattccaactgcctgatcagagaacttggatgtcagctattgaaaacatggcagaaaagctagagagcttcagtgccctgaaacctgaggccagtgagctcttacagtcagtgccctctatgttcaacttcagggcgcctcccaatgccctgccagagaaccttctgcggaagggaaaggagcgctatacctgcagatactgtggcaagatttttccaaggtctgcaaacctaacacggcacttgagaacccacacaggagagcagccttacagatgcaaatactgtgacagatcatttagcatatcttctaacttgcaaaggcatgttcgcaacatccacaataaagagaagccatttaagtgtcacttatgtgataggtgttttggtcaacaaaccaatttagacagacacctaaagaaacatgagaatgggaacatgtccggtacagcaacatcgtcgcctcattctgaactggaaagtacaggtgcgattctggatgacaaagaagatgcttacttcacagaaattcgaaatttcattgggaacagcaaccatggcagccaatctcccaggaatgtggaggagagaatgaatggcagtcattttaaagatgaaaaggctttggtgaccagtcaaaattcagacttgctggatgatgaagaagttgaagatgaggtgttgttagatgaggaggatgaagacaatgatattactggaaaaacaggaaaggaaccagtgacaagtaatttacatgaaggaaaccctgaggatgactatgaagaaaccagtgccctggagatgagttgcaagacatccccagtgaggtataaagaggaagaatataaaagtggactttctgctctagatcatataaggcacttcacagatagcctcaaaatgaggaaaatggaagataatcaatattctgaagctgagctgtcttcttttagtacttcccatgtgccagaggaacttaagcagccgttacacagaaagtccaaatcgcaggcatatgctatgatgctgtcactgtctgacaaggagtccctccattctacatcccacagttcttccaacgtgtggcacagtatggccagggctgcggcggaatccagtgctatccagtccataagccacgtatgacgttatcaaggttgaccagagtgggaccaagtccaacagtagcatggctctttcatataggactatttacaagactgctgagcagaatgccttataaacctgcagggtcactcatctaaagtctagtgaccttaaactgaatgatttaaaaaagaaaagaaagaaaaaagaaactatttattctcgatattttgttttgcacagcaaaggcagctgctgacttctggaagatcaatcaatgcgacttaaagtgattcagtgaaaacaaaaaacttggtgggctgaaggcatcttccagtttaccccaccttagggtatgggtgggtgagaagggcagttgagatggcagcattgatatgaatgaacactccatagaaactgaattctcttttgtacaagatcacctgacatgattgggaacagttgcttttaattacagatttaatttttttcttcgttaaagttttatgtaatttaaccctttgaagacagaagtagttggatgaaatgcacagtcaattattatagaaactgataacagggagtacttgttcccccttttgccttcttaagtacattgtttaaaactagggaaaaagggtatgtgtatattgtaaactatggatgttaacactcaaagaggttaagtcagtgaagtaacctattcatcaccagtaccgctgtaccactaataaattgtttgccaaatccttgtaataacatcttaattttagacaatcatgtcactgtttttaatgtttatttttttgtgtgtgttgcgtgtatcatgtatttatttgttggcaaactattgtttgttgattaaaatagcactgttccagtcagccactactttatgacgtctgaggcacacccctttccgaatttcaaggaccaaggtgacccgacctgtgtatgagagtgccaaatggtgtttggcttttcttaacattcctttttgtttgtttgttttgttttccttcttaatgaactaaatacgaatagatgcaacttagtttttgtaatactgaaatcgattcaattgtataaacgattataatttctttcatggaagcatgattcttctgattaaaaactgtactccatattttatgctggttgtctgcaagcttgtgcgatgttatgttcatgttaatcctatttgtaaaatgaagtgttcccaaccttatgttaaaagagagaagtaaataacagactgtattcagttattttgccctttattgaggaaccagatttgttttctttttgtttgtaatctcattttgaaataatcagcaagttgaggtactttcttcaaatgctttgtacaatataaactgttatgcctttcagtgcattactatgggaggagcaactaaaaaataaagacttacaaaaaggagtattttt

SEQ ID NO: 13 - DNA, 4835 bp, Homo sapiens; identical to SEQ ID NO: 6
  misc_feature: NM_005241.3

SEQ ID NO: 14 - DNA, 5740 bp, Homo sapiens
  misc_feature: NM_001164000.1
cacacacacacacacacaccacacttgtgctttcaagacatcgaaacggaggctatttccctggggaaagaaatcctgcctggcgagatctccccattggttgtttacccggagaaatctacatgtttaagggggatggtgcatccataatcagtctgtccctataggacttgggtcttggcgacctttttgtgacctctcccgccagaggaggctgctgtcactttaaaaatttaaaagaggagcccgtctggcttccgatcagatcactctgggcggcgggagatagctccctttctccctcgccccgggttctttctggatggccgagcagatcctctttaaagagacagttcatgaaatagaaacccggcggctgagcttggagttgcgaaaggggacgatcccgtgagggtccaggacccgcgaaggcgctgcggaggatctgaaagggggatagagctcccctcgcctccccaggccccccaccttttcaaactctcctcctcctgcttgttttcccccattggaactgggaaggagaagtagaagttttagtgggtttcagataactttcattacacatcgggctgataagagcaagagaaagtgagaaaagagggaggtgatgtgaaccagaaggaatagctccgagctcatttaggaagggggaaaaagccaaaacacaccaaacccgggtcacccagacgaaagaagacttcatttcttgtattaaaaatacactgttggcggacaataaatccgaaacgcgtggtcctggagagcagatcctagagacggacaaagttgtcagagacccatttggaaatcgagacgcgaggcttttaaaaaattattattattatttttaaacatctctaaatgttgctcgggatcgtttgaaaggattttcgtgcaggagcgttgggggctgctgattattttattttgtttattttgattcttctgtgaatgcctattattgctgagttgaggccatagaaatctaaagatcttagacgaattttacaatgtgaagttctgcatagatgccagtcaaccagatgttggaagctggctcaagtacattagattcgctggctgttatgatcagcacaaccttgttgcatgccagataaatgatcagatattctatagagtagttgcagacattgcgccgggagaggagcttctgctgttcatgaagagcgaagactatccccatgaaactatggcgccggatatccacgaagaacggcaatatcgctgcgaagactgtgaccagctctttgaatctaaggctgaactagcagatcaccaaaagtttccatgcagtactcctcactcagcattttcaatggttgaagaggactttcagcaaaaactcgaaagcgagaatgatctccaagagatacacacgatccaggagtgtaaggaatgtgaccaagtttttcctgatttgcaaagcctggagaaacacatgctgtcacatactgaagagagggaatacaagtgtgatcagtgtcccaaggcatttaactggaagtccaatttaattcgccaccagatgtcacatgacagtggaaagcactatgaatgtgaaaactgtgccaaggttttcacggaccctagcaaccttcagcggcacattcgctctcagcatgtcggtgcccgggcccatgcatgcccggagtgtggcaaaacgtttgccacttcgtcgggcctcaaacaacacaagcacatccacagcagtgtgaagccctttatctgtgaggtctgccataaatcctatactcagttttcaaacctttgccgtcataagcgcatgcatgctgattgcagaacccaaatcaagtgcaaagactgtggacaaatgttcagcactacgtcttccttaaataaacacaggaggttttgtgagggcaagaaccattttgcggcaggtggattttttggccaaggcatttcacttcctggaaccccagctatggataaaacgtccatggttaatatgagtcatgccaacccgggccttgctgactattttggcgccaataggcatcctgctggtcttacctttccaacagctcctggattttcttttagcttccctggtctgtttccttccggcttgtaccacaggcctcctttgatacctgctagttctcctgttaaaggactatcaagtactgaacagacaaacaaaagtcaaagtcccctcatgacacatcctcagatactgccagctacacaggatattttgaaggcactatctaaacacccatctgtaggggacaataagccagtggagctccagcccgagaggtcctctgaagagaggccctttgagaaaatcagtgaccagtcagagagtagtgaccttgatgatgtcagtacaccaagtggcagtgacctggaaacaacctcgggctctgatctggaaagtgacattgaaagtgataaagagaaatttaaagaaaatggtaaaatgttcaaagacaaagtaagccctcttcagaatctggcttcaataaataataagaaagaatacagcaatcattccattttctcaccatctttagaggagcagactgcggtgtcaggagctgtgaatgattctataaaggctattgcttctattgctgaaaaatactttggttcaacaggactggtggggctgcaagacaaaaaagttggagctttaccttacccttccatgtttcccctcccattttttccagcattctctcaatcaatgtacccatttcctgatagagacttgagatcgttacctttgaaaatggaaccccaatcaccaggtgaagtaaagaaactgcagaagggcagctctgagtccccctttgatctcaccactaagcgaaaggatgagaagcccttgactccagtcccctccaagcctccagtgacacctgccacaagccaagaccagcccctggatctaagtatgggcagtaggagtagagccagtgggacaaagctgactgagcctcgaaaaaaccacgtgtttgggggaaaaaaaggaagcaacgtcgaatcaagacctgcttcagatggttccttgcagcatgcaagacccactcctttctttatggaccctatttacagagtagagaaaagaaaactaactgacccacttgaagctttaaaagagaaatacttgaggccttctccaggattcttgtttcacccacaaatgtcagctattgaaaacatggcagaaaagctagagagcttcagtgccctgaaacctgaggccagtgagctcttacagtcagtgccctctatgttcaacttcagggcgcctcccaatgccctgccagagaaccttctgcggaagggaaaggagcgctatacctgcagatactgtggcaagatttttccaaggtctgcaaacctaacacggcacttgagaacccacacaggagagcagccttacagatgcaaatactgtgacagatcatttagcatatcttctaacttgcaaaggcatgttcgcaacatccacaataaagagaagccatttaagtgtcacttatgtgataggtgttttggtcaacaaaccaatttagacagacacctaaagaaacatgagaatgggaacatgtccggtacagcaacatcgtcgcctcattctgaactggaaagtacaggtgcgattctggatgacaaagaagatgcttacttcacagaaattcgaaatttcattgggaacagcaaccatggcagccaatctcccaggaatgtggaggagagaatgaatggcagtcattttaaagatgaaaaggctttggtgaccagtcaaaattcagacttgctggatgatgaagaagttgaagatgaggtgttgttagatgaggaggatgaagacaatgatattactggaaaaacaggaaaggaaccagtgacaagtaatttacatgaaggaaaccctgaggatgactatgaagaaaccagtgccctggagatgagttgcaagacatccccagtgaggtataaagaggaagaatataaaagtggactttctgctctagatcatataaggcacttcacagatagcctcaaaatgaggaaaatggaagataatcaatattctgaagctgagctgtcttcttttagtacttcccatgtgccagaggaacttaagcagccgttacacagaaagtccaaatcgcaggcatatgctatgatgctgtcactgtctgacaaggagtccctccattctacatcccacagttcttccaacgtgtggcacagtatggccagggctgcggcggaatccagtgctatccagtccataagccacgtatgacgttatcaaggttgaccagagtgggaccaagtccaacagtagcatggctctttcatataggactatttacaagactgctgagcagaatgccttataaacctgcagggtcactcatctaaagtctagtgaccttaaactgaatgatttaaaaaagaaaagaaagaaaaaagaaactatttattctcgatattttgttttgcacagcaaaggcagctgctgacttctggaagatcaatcaatgcgacttaaagtgattcagtgaaaacaaaaaacttggtgggctgaaggcatcttccagtttaccccaccttagggtatgggtgggtgagaagggcagttgagatggcagcattgatatgaatgaacactccatagaaactgaattctcttttgtacaagatcacctgacatgattgggaacagttgcttttaattacagatttaatttttttcttcgttaaagttttatgtaatttaaccctttgaagacagaagtagttggatgaaatgcacagtcaattattatagaaactgataacagggagtacttgttcccccttttgccttcttaagtacattgtttaaaactagggaaaaagggtatgtgtatattgtaaactatggatgttaacactcaaagaggttaagtcagtgaagtaacctattcatcaccagtaccgctgtaccactaataaattgtttgccaaatccttgtaataacatcttaattttagacaatcatgtcactgtttttaatgtttatttttttgtgtgtgttgcgtgtatcatgtatttatttgttggcaaactattgtttgttgattaaaatagcactgttccagtcagccactactttatgacgtctgaggcacacccctttccgaatttcaaggaccaaggtgacccgacctgtgtatgagagtgccaaatggtgtttggcttttcttaacattcctttttgtttgtttgttttgttttccttcttaatgaactaaatacgaatagatgcaacttagtttttgtaatactgaaatcgattcaattgtataaacgattataatttctttcatggaagcatgattcttctgattaaaaactgtactccatattttatgctggttgtctgcaagcttgtgcgatgttatgttcatgttaatcctatttgtaaaatgaagtgttcccaaccttatgttaaaagagagaagtaaataacagactgtattcagttattttgccctttattgaggaaccagatttgttttctttttgtttgtaatctcattttgaaataatcagcaagttgaggtactttcttcaaatgctttgtacaatataaactgttatgcctttcagtgcattactatgggaggagcaactaaaaaataaagacttacaaaaaggagtattttt

SEQ ID NO: 15 - DNA, 4811 bp, Homo sapiens
  misc_feature: NM_001163999.1
ccttgccaagtaacagctttgctgtccaacatcgtgtgctgcttcgcgagaaagtcacattcggaccctttggctagattatcttagacgaattttacaatgtgaagttctgcatagatgccagtcaaccagatgttggaagctggctcaagtacattagattcgctggctgttatgatcagcacaaccttgttgcatgccagataaatgatcagatattctatagagtagttgcagacattgcgccgggagaggagcttctgctgttcatgaagagcgaagactatccccatgaaactatggcgccggatatccacgaagaacggcaatatcgctgcgaagactgtgaccagctctttgaatctaaggctgaactagcagatcaccaaaagtttccatgcagtactcctcactcagcattttcaatggttgaagaggactttcagcaaaaactcgaaagcgagaatgatctccaagagatacacacgatccaggagtgtaaggaatgtgaccaagtttttcctgatttgcaaagcctggagaaacacatgctgtcacatactgaagagagggaatacaagtgtgatcagtgtcccaaggcatttaactggaagtccaatttaattcgccaccagatgtcacatgacagtggaaagcactatgaatgtgaaaactgtgccaagcaggttttcacggaccctagcaaccttcagcggcacattcgctctcagcatgtcggtgcccgggcccatgcatgcccggagtgtggcaaaacgtttgccacttcgtcgggcctcaaacaacacaagcacatccacagcagtgtgaagccctttatctgtgaggtctgccataaatcctatactcagttttcaaacctttgccgtcataagcgcatgcatgctgattgcagaacccaaatcaagtgcaaagactgtggacaaatgttcagcactacgtcttccttaaataaacacaggaggttttgtgagggcaagaaccattttgcggcaggtggattttttggccaaggcatttcacttcctggaaccccagctatggataaaacgtccatggttaatatgagtcatgccaacccgggccttgctgactattttggcgccaataggcatcctgctggtcttacctttccaacagctcctggattttcttttagcttccctggtctgtttccttccggcttgtaccacaggcctcctttgatacctgctagttctcctgttaaaggactatcaagtactgaacagacaaacaaaagtcaaagtcccctcatgacacatcctcagatactgccagctacacaggatattttgaaggcactatctaaacacccatctgtaggggacaataagccagtggagctccagcccgagaggtcctctgaagagaggccctttgagaaaatcagtgaccagtcagagagtagtgaccttgatgatgtcagtacaccaagtggcagtgacctggaaacaacctcgggctctgatctggaaagtgacattgaaagtgataaagagaaatttaaagaaaatggtaaaatgttcaaagacaaagtaagccctcttcagaatctggcttcaataaataataagaaagaatacagcaatcattccattttctcaccatctttagaggagcagactgcggtgtcaggagctgtgaatgattctataaaggctattgcttctattgctgaaaaatactttggttcaacaggactggtggggctgcaagacaaaaaagttggagctttaccttacccttccatgtttcccctcccattttttccagcattctctcaatcaatgtacccatttcctgatagagacttgagatcgttacctttgaaaatggaaccccaatcaccaggtgaagtaaagaaactgcagaagggcagctctgagtccccctttgatctcaccactaagcgaaaggatgagaagcccttgactccagtcccctccaagcctccagtgacacctgccacaagccaagaccagcccctggatctaagtatgggcagtaggagtagagccagtgggacaaagctgactgagcctcgaaaaaaccacgtgtttgggggaaaaaaaggaagcaacgtcgaatcaagacctgcttcagatggttccttgcagcatgcaagacccactcctttctttatggaccctatttacagagtagagaaaagaaaactaactgacccacttgaagctttaaaagagaaatacttgaggccttctccaggattcttgtttcacccacaaatgtcagctattgaaaacatggcagaaaagctagagagcttcagtgccctgaaacctgaggccagtgagctcttacagtcagtgccctctatgttcaacttcagggcgcctcccaatgccctgccagagaaccttctgcggaagggaaaggagcgctatacctgcagatactgtggcaagatttttccaaggtctgcaaacctaacacggcacttgagaacccacacaggagagcagccttacagatgcaaatactgtgacagatcatttagcatatcttctaacttgcaaaggcatgttcgcaacatccacaataaagagaagccatttaagtgtcacttatgtgataggtgttttggtcaacaaaccaatttagacagacacctaaagaaacatgagaatgggaacatgtccggtacagcaacatcgtcgcctcattctgaactggaaagtacaggtgcgattctggatgacaaagaagatgcttacttcacagaaattcgaaatttcattgggaacagcaaccatggcagccaatctcccaggaatgtggaggagagaatgaatggcagtcattttaaagatgaaaaggctttggtgaccagtcaaaattcagacttgctggatgatgaagaagttgaagatgaggtgttgttagatgaggaggatgaagacaatgatattactggaaaaacaggaaaggaaccagtgacaagtaatttacatgaaggaaaccctgaggatgactatgaagaaaccagtgccctggagatgagttgcaagacatccccagtgaggtataaagaggaagaatataaaagtggactttctgctctagatcatataaggcacttcacagatagcctcaaaatgaggaaaatggaagataatcaatattctgaagctgagctgtcttcttttagtacttcccatgtgccagaggaacttaagcagccgttacacagaaagtccaaatcgcaggcatatgctatgatgctgtcactgtctgacaaggagtccctccattctacatcccacagttcttccaacgtgtggcacagtatggccagggctgcggcggaatccagtgctatccagtccataagccacgtatgacgttatcaaggttgaccagagtgggaccaagtccaacagtagcatggctctttcatataggactatttacaagactgctgagcagaatgccttataaacctgcagggtcactcatctaaagtctagtgaccttaaactgaatgatttaaaaaagaaaagaaagaaaaaagaaactatttattctcgatattttgttttgcacagcaaaggcagctgctgacttctggaagatcaatcaatgcgacttaaagtgattcagtgaaaacaaaaaacttggtgggctgaaggcatcttccagtttaccccaccttagggtatgggtgggtgagaagggcagttgagatggcagcattgatatgaatgaacactccatagaaactgaattctcttttgtacaagatcacctgacatgattgggaacagttgcttttaattacagatttaatttttttcttcgttaaagttttatgtaatttaaccctttgaagacagaagtagttggatgaaatgcacagtcaattattatagaaactgataacagggagtacttgttcccccttttgccttcttaagtacattgtttaaaactagggaaaaagggtatgtgtatattgtaaactatggatgttaacactcaaagaggttaagtcagtgaagtaacctattcatcaccagtaccgctgtaccactaataaattgtttgccaaatccttgtaataacatcttaattttagacaatcatgtcactgtttttaatgtttatttttttgtgtgtgttgcgtgtatcatgtatttatttgttggcaaactattgtttgttgattaaaatagcactgttccagtcagccactactttatgacgtctgaggcacacccctttccgaatttcaaggaccaaggtgacccgacctgtgtatgagagtgccaaatggtgtttggcttttcttaacattcctttttgtttgtttgttttgttttccttcttaatgaactaaatacgaatagatgcaacttagtttttgtaatactgaaatcgattcaattgtataaacgattataatttctttcatggaagcatgattcttctgattaaaaactgtactccatattttatgctggttgtctgcaagcttgtgcgatgttatgttcatgttaatcctatttgtaaaatgaagtgttcccaaccttatgttaaaagagagaagtaaataacagactgtattcagttattttgccctttattgaggaaccagatttgttttctttttgtttgtaatctcattttgaaataatcagcaagttgaggtactttcttcaaatgctttgtacaatataaactgttatgcctttcagtgcattactatgggaggagcaactaaaaaataaagacttacaaaaaggagtattttt
